(19) United States
(12) Patent Application Publication
(10) Pub. No.: US 2023/0265217 A1
(43) Pub. Date: Aug. 24, 2023

(54) MULTISPECIFIC SARS-COV-2 ANTIBODIES AND METHODS OF USE

(71) Applicant: Twist Bioscience Corporation, South San Francisco, CA (US)

(72) Inventors: Aaron SATO, Burlingame, CA (US); Tom YUAN, San Francisco, CA (US); Ana G. LUJAN HERNANDEZ, San Francisco, CA (US)

(21) Appl. No.: 18/050,007

(22) Filed: Oct. 26, 2022

Related U.S. Application Data
(60) Provisional application No. 63/272,645, filed on Oct. 27, 2021.
(60) Provisional application No. 63/374,505, filed on Sep. 2, 2022.

(51) Int. Cl. C07K 16/46; A61P 31/14

(52) U.S. Cl. CPC C07K 16/468; A61P 31/14; C07K 2317/565; C07K 2317/31; C07K 2317/92; C07K 2317/30

(57) ABSTRACT

Provided herein are methods and compositions relating to libraries of optimized antibodies (e.g., multispecific antibodies) having nucleic acids encoding for an antibody comprising modified sequences. Libraries described herein comprise nucleic acids encoding SARS-CoV-2 or ACE2 antibodies.

### CROSS REFERENCE

[0001] This application claims the benefit of U.S. Provisional Patent Application No. 63/272,645, filed on Oct. 27, 2021 and U.S. Provisional Patent Application No. 63/374,505, filed on Sep. 2, 2022, which are each herein incorporated by reference in their entirety.

### SEQUENCE LISTING

[0002] The instant application contains a Sequence Listing which has been submitted electronically in XML format and is hereby incorporated by reference in its entirety. Said XML copy, created on Dec. 20, 2022, is named 44854-846_201_SL.xml and is 2,922,041 bytes in size.

### BACKGROUND

[0003] Coronaviruses like severe acute respiratory coronavirus 2 (SARS-CoV-2) can cause severe respiratory problems. Therapies are needed for treating and preventing viral infection caused by coronaviruses like SARS-CoV-2. Antibodies possess the capability to bind with high specificity and affinity to biological targets. However, the design of therapeutic antibodies is challenging due to balancing of immunological effects with efficacy. Thus, there is a need to develop compositions and methods for the optimization of antibody properties in order to develop effective therapies for treating coronavirus infections.

### INCORPORATION BY REFERENCE

[0004] All publications, patents, and patent applications mentioned in this specification are herein incorporated by reference to the same extent as if each individual publication, patent, or patent application was specifically and individually indicated to be incorporated by reference.

### BRIEF SUMMARY

[0005] Provided herein are multispecific antibodies comprising at least two binding domains to a spike glycoprotein or a receptor of the spike glycoprotein: (a) a first binding domain of the at least two binding domains comprising a first variable domain, heavy chain region (VH), wherein the first VH region comprises complementarity determining regions CDRH1, CDRH2, and CDRH3, and wherein (i) an amino acid sequence of CDRH1 is as set forth in any one of SEQ ID NOs: 1-122; (ii) an amino acid sequence of CDRH2 is as set forth in any one of SEQ ID NOs: 652-773; and (iii) an amino acid sequence of CDRH3 is as set forth in any one of SEQ ID NOs: 1303-1425; and (b) a second binding domain of the at least two binding domains comprising a second variable domain, heavy chain region (VH), wherein the first VH region comprises complementarity determining regions CDRH1, CDRH2, and CDRH3, and wherein (i) an amino acid sequence of CDRH1 is as set forth in any one of SEQ ID NOs: 123-651; (ii) an amino acid sequence of CDRH2 is as set forth in any one of SEQ ID NOs: 774-1302; and (iii) an amino acid sequence of CDRH3 is as set forth in any one of SEQ ID NOs: 1426-1953. Further provided herein are multispecific antibodies, wherein the multispecific antibody is bispecific, trispecific, or tetraspecific. Further provided herein are multispecific antibodies, wherein the multispecific antibody is bispecific. Further provided herein are multispecific antibodies, wherein the multispecific antibody is bivalent, trivalent, or tetravalent. Further provided herein are multispecific antibodies, wherein the multispecific antibody is bivalent. Further provided herein are multispecific antibodies, wherein the antibody or antibody fragment comprises a K_{D} of less than 50 nM. Further provided herein are multispecific antibodies, wherein the antibody or antibody fragment comprises a K_{D} of less than 25 nM. Further provided herein are multispecific antibodies, wherein the antibody or antibody fragment comprises a K_{D} of less than 10 nM. Further provided herein are multispecific antibodies, wherein the antibody or antibody fragment comprises a K_{D} of less than 5 nM.

[0006] Provided herein are multispecific antibodies comprising at least two binding domains to a spike glycoprotein or a receptor of the spike glycoprotein: (a) a first binding domain of the at least two binding domains comprising a first variable domain, heavy chain region (VH) comprising an amino acid sequence at least about 90% identical to a sequence as set forth in any one of SEQ ID NOs: 2212-2333; and (b) a second binding domain of the at least two binding domains comprising a second variable domain, heavy chain region (VH) comprising an amino acid sequence at least about 90% identical to a sequence as set forth in any one of SEQ ID NOs: 2334-3099. Further provided herein are multispecific antibodies, wherein the multispecific antibody is bispecific, trispecific, or tetraspecific. Further provided herein are multispecific antibodies, wherein the multispecific antibody is bispecific. Further provided herein are multispecific antibodies, wherein the multispecific antibody is bivalent, trivalent, or tetravalent. Further provided herein are multispecific antibodies, wherein the multispecific antibody is bivalent. Further provided herein are multispecific antibodies, wherein the antibody or antibody fragment comprises a K_{D} of less than 50 nM. Further provided herein are multispecific antibodies, wherein the antibody or antibody fragment comprises a K_{D} of less than 25 nM. Further provided herein are multispecific antibodies, wherein the antibody or antibody fragment comprises a K_{D} of less than 10 nM. Further provided herein are multispecific antibodies, wherein the antibody or antibody fragment comprises a K_{D} of less than 5 nM.

[0007] Provided herein are nucleic acid compositions comprising: a) a first nucleic acid encoding a first variable domain, heavy chain region (VH) comprising an amino acid sequence at least about 90% identical to a sequence as set forth in any one of SEQ ID NOs: 2212-2333; b) a second nucleic acid encoding a second variable domain, heavy chain region (VH) comprising an amino acid sequence at least about 90% identical to a sequence as set forth in any one of SEQ ID NOs: 2334-3099; and an excipient.

[0008] Provided herein are methods of treating a SARS-CoV-2 infection, comprising administering the multispecific antibody described herein. Further provided herein are methods of treating a SARS-CoV-2 infection, wherein the multispecific antibody is administered prior to exposure to SARS-CoV-2. Further provided herein are methods of treating a SARS-CoV-2 infection, wherein the multispecific antibody is administered at least about 1 week prior to exposure to SARS-CoV-2. Further provided herein are methods of treating a SARS-CoV-2 infection, wherein the multispecific antibody is administered at least about 1 month prior to exposure to SARS-CoV-2. Further provided herein are methods of treating a SARS-CoV-2 infection, wherein the multispecific antibody is administered at least about 5 months prior to exposure to SARS-CoV-2. Further provided herein are methods of treating a SARS-CoV-2 infection, wherein the multispecific antibody is administered after exposure to SARS-CoV-2. Further provided herein are methods of treating a SARS-CoV-2 infection, wherein the multispecific antibody is administered at most about 24 hours after exposure to SARS-CoV-2. Further provided herein are methods of treating a SARS-CoV-2 infection, wherein the multispecific antibody is administered at most about 1 week after exposure to SARS-CoV-2. Further provided herein are methods of treating a SARS-CoV-2 infection, wherein the multispecific antibody is administered at most about 1 month after exposure to SARS-CoV-2.

[0009] Provided herein are methods of treating an individual with a SARS-CoV-2 infection with the multispecific antibody described herein comprising: (a) obtaining or having obtained a sample from the individual; (b) performing or having performed an expression level assay on the sample to determine expression levels of SARS-CoV-2 antibodies; and (c) if the sample has an expression level of the SARS-CoV-2 antibodies then administering to the individual the antibody or antibody fragment described herein, thereby treating the SARS-CoV-2 infection.

[0010] Provided herein are methods of diagnosing an individual with a SARS-CoV-2 infection with the multispecific antibody described herein comprising: (a) obtaining or having obtained a sample from the individual; and (b) performing or having performed an expression level assay on the sample to determine expression levels of SARS-CoV-2 antibodies using the multispecific antibody described herein.

### BRIEF DESCRIPTION OF THE DRAWINGS

[0011] The patent or application file contains at least one drawing executed in color. Copies of this patent or patent application publication with color drawing(s) will be provided by the Office upon request and payment of the necessary fee.

[0012] FIG. 1 depicts a workflow for antibody optimization.

[0013] FIG. 2 presents a diagram of steps demonstrating an exemplary process workflow for gene synthesis as disclosed herein.

[0014] FIG. 3 illustrates an example of a computer system.

[0015] FIG. 4 is a block diagram illustrating an architecture of a computer system.

[0016] FIG. 5 is a diagram demonstrating a network configured to incorporate a plurality of computer systems, a plurality of cell phones and personal data assistants, and Network Attached Storage (NAS).

[0017] FIG. 6 is a block diagram of a multiprocessor computer system using a shared virtual address memory space.

[0018] FIG. 7 depicts the locations of different mutations in SARS-CoV-2 variants.

[0019] FIG. 8A is a schema of a panning workflow. FIG. 8B is a schema of an additional panning workflow.

[0020] FIG. 9A depicts Carterra SPR kinetics against the SARS-COV-2 S1.

[0021] FIG. 9B depicts additional Carterra SPR kinetics against the SARS-COV-2 S1.

[0022] FIG. 9C depicts Carterra SPR kinetics against the SARS-CoV-2 501.V2 S1.

[0023] FIG. 9D depicts Carterra SPR kinetics against the SARS-CoV-2 B.1.1.7 S1.

[0024] FIG. 9E depicts Carterra SPR kinetics against the SARS-COV-2 CA Var. W152C L452R D614G S1.

[0025] FIG. 9F depicts Carterra SPR kinetics against the SARS-COV-2 RBD India Var. L452R E484Q S1.

[0026] FIG. 10 depicts the S1-RBD-mFc binding competition assay used.

[0027] FIG. 11A depicts the results of the competition assay against Acro S1.

[0028] FIG. 11B depicts the results of the competition assay against D614G S1.

[0029] FIG. 11C depicts the results of the competition assay against 501.V2 South Africa S1.

[0030] FIG. 11D depicts the results of the competition assay against B.1.1.7 UK S1.

[0031] FIGS. 12A-12D depict the results of comparing antibody 181-8 mutant Fc, 5-3 Fc mutant, and Acro neutralizing antibody in an Acro S1-mFc binding competition assay (FIG. 12A), a TB178.8-6 binding competition assay (FIG. 12B), a TB178-8 binding competition assay (FIG. 12C), and a TB178-9 binding competition assay (FIG. 12D).

[0032] FIG. 13A depicts the binding of the CA variant S1 to Vero cells.

[0033] FIG. 13B depicts the results of a competition assay of the panel of variants against the CCA S1 spike protein.

[0034] FIGS. 14A-14F depict the result of a binding competition assay comparing SARS-CoV-2 cross-reacting antibody variants with different strains of SARS-CoV-2, including Acro S1 (FIG. 14A), 178-6 (FIG. 14B), 178-8 (FIG. 14C), 178-9 (FIG. 14D), 178-10 using 1 ug/ml (FIG. 14E), and 178-10 using 0.2 ug/ml (FIG. 14F).

[0035] FIGS. 15A-15H depict results from pseudovirus assays of the variant D614G (FIG. 15A), alpha variant (FIG. 15B), beta variant (FIG. 15C), gamma variant (FIG. 15D), epsilon variant 427 (FIG. 15E), and epsilon variant 429 (FIG. 15F). FIG. 15G depicts a summary of the pseudovirus assays. FIG. 15H depicts an additional pseudovirus assay with select antibodies.

[0036] FIG. 16A depicts a schema of the bispecific antibodies described herein. FIG. 16B depicts an alternate schema of the bispecific antibodies described herein.

[0037] FIG. 17A depicts the results of a 178-9 binding competition assay comparing SARS-CoV-2 cross-reacting antibody variants. FIG. 17B depicts the results of a 178-9 binding competition assay comparing SARS-CoV-2 cross-reacting additional antibody variants. FIG. 17C depicts the results of a 178-9 binding competition assay comparing SARS-CoV-2 cross-reacting additional antibody variants.

[0038] FIG. 18A depicts the results of a 178-8 binding competition assay comparing SARS-CoV-2 cross-reacting antibody variants. FIG. 18B depicts the results of a 178-8 binding competition assay comparing SARS-CoV-2 cross-reacting additional antibody variants. FIG. 18C depicts the results of a 178-8 binding competition assay comparing SARS-CoV-2 cross-reacting antibody additional variants.

[0039] FIG. 19A depicts the results of a 178-10 binding competition assay comparing SARS-CoV-2 cross-reacting antibody variants. FIG. 19B depicts the results of a 178-10 binding competition assay comparing SARS-CoV-2 cross-reacting antibody variants. FIG. 19C depicts the results of a 178-10 binding competition assay comparing SARS-CoV-2 cross-reacting antibody variants.

[0040] FIGS. 20A-20B depict the results of the bispecific antibodies against pseudovirus variants of concern (VOCs) epsilon 427 (FIG. 20A) and epsilon 429 (FIG. 20B).

[0041] FIGS. 21A-21B depict the results of the bispecific antibodies in viral neutralization assays against variant AZ1 (FIG. 21A) and variant delta (FIG. 21B). FIG. 21C shows a table summary of the results. FIG. 21D depicts data from variant B.1.351. FIG. 21E depicts a graph summarizing the results.

[0042] FIG. 22 depicts the results from hamster low-dose therapeutic vs. preventative studies. Preventative (1 mg/Kg) results are shown for variant 6A-63 (Panel A), variant 6A-3 (Panel B), and variant 81-36 (Panel C). Therapeutic (1.5 mg/Kg) results are shown for variant 6A-3 (Panel D). Panel E shows that days 5-8 showed significant protection. Panel F shows health score results for the therapeutic hamster data. Panel G shows post-challenge data for variant 6A-3 in both the lungs and nares. Significance is denoted as *P≤0.05; **P≤0.01; ***P≤0.001.

[0043] FIG. 23 depicts Carterra SPR kinetics against different variants of SARS-CoV-2.

[0044] FIG. 24A depicts a the results of a neutralization assay. FIG. 24B depicts the results of a surface RBD display assay. In the surface RBD assay data points are colored based on concentration wherein red denotes 15 ug/mL, blue denotes 3 ug/mL, orange denotes 0.6 ug/mL and green denotes 0.24 ug/mL of each variant.

[0045] FIG. 25 depicts antibody yield from 1 mL Expi293 Cell Culture.

### DETAILED DESCRIPTION

[0046] The present disclosure employs, unless otherwise indicated, conventional molecular biology techniques, which are within the skill of the art. Unless defined otherwise, all technical and scientific terms used herein have the same meaning as is commonly understood by one of ordinary skill in the art.

### Definitions

[0047] Throughout this disclosure, various embodiments are presented in a range format. It should be understood that the description in range format is merely for convenience and brevity and should not be construed as an inflexible limitation on the scope of any embodiments. Accordingly, the description of a range should be considered to have specifically disclosed all the possible subranges as well as individual numerical values within that range to the tenth of the unit of the lower limit unless the context clearly dictates otherwise. For example, description of a range such as from 1 to 6 should be considered to have specifically disclosed subranges such as from 1 to 3, from 1 to 4, from 1 to 5, from 2 to 4, from 2 to 6, from 3 to 6 etc., as well as individual values within that range, for example, 1.1, 2, 2.3, 5, and 5.9. This applies regardless of the breadth of the range. The upper and lower limits of these intervening ranges may independently be included in the smaller ranges, and are also encompassed within the disclosure, subject to any specifically excluded limit in the stated range. Where the stated range includes one or both of the limits, ranges excluding either or both of those included limits are also included in the disclosure, unless the context clearly dictates otherwise.

[0048] The terminology used herein is for the purpose of describing particular embodiments only and is not intended to be limiting of any embodiment. As used herein, the singular forms “a,” “an” and “the” are intended to include the plural forms as well, unless the context clearly indicates otherwise. It will be further understood that the terms “comprises” and/or “comprising,” when used in this specification, specify the presence of stated features, integers, steps, operations, elements, and/or components, but do not preclude the presence or addition of one or more other features, integers, steps, operations, elements, components, and/or groups thereof. As used herein, the term “and/or” includes any and all combinations of one or more of the associated listed items.

[0049] Unless specifically stated or obvious from context, as used herein, the term “about” in reference to a number or range of numbers is understood to mean the stated number and numbers +/−10% thereof, or 10% below the lower listed limit and 10% above the higher listed limit for the values listed for a range.

[0050] Unless specifically stated, as used herein, the term “nucleic acid” encompasses double- or triple-stranded nucleic acids, as well as single-stranded molecules. In double- or triple-stranded nucleic acids, the nucleic acid strands need not be coextensive (i.e., a double-stranded nucleic acid need not be double-stranded along the entire length of both strands). Nucleic acid sequences, when provided, are listed in the 5′ to 3′ direction, unless stated otherwise. Methods described herein provide for the generation of isolated nucleic acids. Methods described herein additionally provide for the generation of isolated and purified nucleic acids. A “nucleic acid” as referred to herein can comprise at least 5, 10, 20, 30, 40, 50, 60, 70, 80, 90, 100, 125, 150, 175, 200, 225, 250, 275, 300, 325, 350, 375, 400, 425, 450, 475, 500, 600, 700, 800, 900, 1000, 1100, 1200, 1300, 1400, 1500, 1600, 1700, 1800, 1900, 2000, or more bases in length. Moreover, provided herein are methods for the synthesis of any number of polypeptide-segments encoding nucleotide sequences, including sequences encoding non-ribosomal peptides (NRPs), sequences encoding non-ribosomal peptide-synthetase (NRPS) modules and synthetic variants, polypeptide segments of other modular proteins, such as antibodies, polypeptide segments from other protein families, including non-coding DNA or RNA, such as regulatory sequences e.g. promoters, transcription factors, enhancers, siRNA, shRNA, RNAi, miRNA, small nucleolar RNA derived from microRNA, or any functional or structural DNA or RNA unit of interest. The following are non-limiting examples of polynucleotides: coding or non-coding regions of a gene or gene fragment, intergenic DNA, loci (locus) defined from linkage analysis, exons, introns, messenger RNA (mRNA), transfer RNA, ribosomal RNA, short interfering RNA (siRNA), short-hairpin RNA (shRNA), micro-RNA (miRNA), small nucleolar RNA, ribozymes, complementary DNA (cDNA), which is a DNA representation of mRNA, usually obtained by reverse transcription of messenger RNA (mRNA) or by amplification; DNA molecules produced synthetically or by amplification, genomic DNA, recombinant polynucleotides, branched polynucleotides, plasmids, vectors, isolated DNA of any sequence, isolated RNA of any sequence, nucleic acid probes, and primers. cDNA encoding for a gene or gene fragment referred herein may comprise at least one region encoding for exon sequences without an intervening intron sequence in the genomic equivalent sequence. cDNA described herein may be generated by de novo synthesis.

[0051] Antibody Optimization Library for Coronavirus

[0052] Provided herein are methods, compositions, and systems for the optimization of antibodies for coronavirus. In some embodiments, the antibodies are optimized for SARS-CoV, MERS-CoV, CoV-229E, HCoV-NL63, HCoV-0C43, or HCoV-HKU1. In some embodiments, the antibodies are optimized for SARS-CoV-2. In some embodiments, the antibodies are optimized for a receptor that binds to the coronavirus. In some embodiments, the receptor of the coronavirus is ACE2 or dipeptidyl peptidase 4 (DPP4). In some embodiments, the antibodies are optimized based on interactions between the coronavirus and the receptor that binds the coronavirus. In some embodiments, the antibodies are optimized for angiotensin-converting enzyme 2 (ACE2). In some embodiments, the antibodies are optimized based on interactions between SARS-CoV-2 and ACE2.

[0053] Antibodies are in some instances optimized by the design of in-silico libraries comprising variant sequences of an input antibody sequence (FIG. 1). Input sequences 100 are in some instances modified in-silico 102 with one or more mutations or variants to generate libraries of optimized sequences 103. In some instances, such libraries are synthesized, cloned into expression vectors, and translation products (antibodies) evaluated for activity. In some instances, fragments of sequences are synthesized and subsequently assembled. In some instances, expression vectors are used to display and enrich desired antibodies, such as phage display. Selection pressures used during enrichment in some instances includes, but is not limited to, binding affinity, toxicity, immunological tolerance, stability, receptor-ligand competition, or developability. Such expression vectors allow antibodies with specific properties to be selected (“panning”), and subsequent propagation or amplification of such sequences enriches the library with these sequences. Panning rounds can be repeated any number of times, such as 1, 2, 3, 4, 5, 6, 7, or more than 7 rounds. Sequencing at one or more rounds is in some instances used to identify which sequences 105 have been enriched in the library.

[0054] Described herein are methods and systems of in-silico library design. For example, an antibody or antibody fragment sequence is used as input. In some instances, the antibody sequence used as input is an antibody or antibody fragment sequence that binds SARS-CoV-2. In some instances, the input is an antibody or antibody fragment sequence that binds a protein of SARS-CoV-2. In some instances, the protein is a spike glycoprotein, a membrane protein, an envelope protein, a nucleocapsid protein, or combinations thereof. In some instances, the protein is a spike glycoprotein of SARS-CoV-2. In some instances, the protein is a receptor binding domain of SARS-CoV-2. In some instances, the input sequence is an antibody or antibody fragment sequence that binds angiotensin-converting enzyme 2 (ACE2). In some instances, the input sequence is an antibody or antibody fragment sequence that binds an extracellular domain of the angiotensin-converting enzyme 2 (ACE2).

[0055] A database 102 comprising known mutations or variants of one or more viruses is queried 101, and a library 103 of sequences comprising combinations of these mutations or variants are generated. In some instances, the database comprises known mutations or variants of SARS-CoV-like coronaviruses, SARS-CoV-2, SARS-CoV, or combinations thereof. In some instances, the database comprises known mutations or variants of the spike protein of SARS-CoV-like coronaviruses, SARS-CoV-2, SARS-CoV, or combinations thereof. In some instances, the database comprises known mutations or variants of the receptor binding domain of SARS-CoV-like coronaviruses, SARS-CoV-2, SARS-CoV, or combinations thereof. In some instances, the database comprises mutations or variants of a protein of SARS-CoV-like coronaviruses, SARS-CoV-2, SARS-CoV, or combinations thereof that binds to ACE2.

[0056] In some instances, the input sequence is a heavy chain sequence of an antibody or antibody fragment that binds SARS-CoV-like coronaviruses, SARS-CoV-2, SARS-CoV, or combinations thereof. In some instances, the input sequence is a light chain sequence of an antibody or antibody fragment that binds SARS-CoV-like coronaviruses, SARS-CoV-2, SARS-CoV, or combinations thereof. In some instances, the heavy chain sequence comprises varied CDR regions. In some instances, the light chain sequence comprises varied CDR regions. In some instances, known mutations or variants from CDRs are used to build the sequence library. Filters 104, or exclusion criteria, are in some instances used to select specific types of variants for members of the sequence library. For example, sequences having a mutation or variant are added if a minimum number of organisms in the database have the mutation or variant. In some instances, additional CDRs are specified for inclusion in the database. In some instances, specific mutations or variants or combinations of mutations or variants are excluded from the library (e.g., known immunogenic sites, structure sites, etc.). In some instances, specific sites in the input sequence are systematically replaced with histidine, aspartic acid, glutamic acid, or combinations thereof. In some instances, the maximum or minimum number of mutations or variants allowed for each region of an antibody are specified. Mutations or variants in some instances are described relative to the input sequence or the input sequence's corresponding germline sequence. For example, sequences generated by the optimization comprise at least 1, 2, 3, 4, 5, 6, 7, 8, 9, 10, 11, 12, 13, 14, 15, 16, or more than 16 mutations or variants from the input sequence. In some instances, sequences generated by the optimization comprise no more than 1, 2, 3, 4, 5, 6, 7, 8, 9, 10, 11, 12, 13, 14, 15, 16, or no more than 18 mutations or variants from the input sequence. In some instances, sequences generated by the optimization comprise about 1, 2, 3, 4, 5, 6, 7, 8, 9, 10, 11, 12, 13, 14, 15, 16, or about 18 mutations or variants relative to the input sequence. In some instances, sequences generated by the optimization comprise about 1, 2, 3, 4, 5, 6, or 7 mutations or variants from the input sequence in a first CDR region. In some instances, sequences generated by the optimization comprise about 1, 2, 3, 4, 5, 6, or 7 mutations or variants from the input sequence in a second CDR region. In some instances, sequences generated by the optimization comprise about 1, 2, 3, 4, 5, 6, or 7 mutations or variants from the input sequence in a third CDR region. In some instances, sequences generated by the optimization comprise about 1, 2, 3, 4, 5, 6, or 7 mutations or variants from the input sequence in a first CDR region of a heavy chain. In some instances, sequences generated by the optimization comprise about 1, 2, 3, 4, 5, 6, or 7 mutations or variants from the input sequence in a second CDR region of a heavy chain. In some instances, sequences generated by the optimization comprise about 1, 2, 3, 4, 5, 6, or 7 mutations or variants from the input sequence in a third CDR region of a heavy chain. In some instances, sequences generated by the optimization comprise about 1, 2, 3, 4, 5, 6, or 7 mutations or variants from the input sequence in a first CDR region of a light chain. In some instances, sequences generated by the optimization comprise about 1, 2, 3, 4, 5, 6, or 7 mutations or variants from the input sequence in a second CDR region of a light chain. In some instances, sequences generated by the optimization comprise about 1, 2, 3, 4, 5, 6, or 7 mutations or variants from the input sequence in a third CDR region of a light chain. In some instances, a first CDR region is CDR1. In some instances, a second CDR region is CDR2. In some instances, a third CDR region is CDR3. In-silico antibodies libraries are in some instances synthesized, assembled, and enriched for desired sequences.

[0057] The germline sequences corresponding to an input sequence may also be modified to generate sequences in a library. For example, sequences generated by the optimization methods described herein comprise at least 1, 2, 3, 4, 5, 6, 7, 8, 9, 10, 11, 12, 13, 14, 15, 16, or more than 16 mutations or variants from the germline sequence. In some instances, sequences generated by the optimization comprise no more than 1, 2, 3, 4, 5, 6, 7, 8, 9, 10, 11, 12, 13, 14, 15, 16, or no more than 18 mutations or variants from the germline sequence. In some instances, sequences generated by the optimization comprise about 1, 2, 3, 4, 5, 6, 7, 8, 9, 10, 11, 12, 13, 14, 15, 16, or about 18 mutations or variants relative to the germline sequence.

[0058] Provided herein are methods, systems, and compositions for antibody optimization, wherein the input sequence comprises mutations or variants in an antibody region. Exemplary regions of the antibody include, but are not limited to, a complementarity-determining region (CDR), a variable domain, or a constant domain. In some instances, the CDR is CDR1, CDR2, or CDR3. In some instances, the CDR is a heavy domain including, but not limited to, CDRH1, CDRH2, and CDRH3. In some instances, the CDR is a light domain including, but not limited to, CDRL1, CDRL2, and CDRL3. In some instances, the variable domain is variable domain, light chain (VL) or variable domain, heavy chain (VH). In some instances, the VL domain comprises kappa or lambda chains. In some instances, the constant domain is constant domain, light chain (CL) or constant domain, heavy chain (CH). In some instances, sequences generated by the optimization comprise about 1, 2, 3, 4, 5, 6, or 7 mutations or variants from the germline sequence in a first CDR region. In some instances, sequences generated by the optimization comprise about 1, 2, 3, 4, 5, 6, or 7 mutations or variants from the germline sequence in a second CDR region. In some instances, sequences generated by the optimization comprise about 1, 2, 3, 4, 5, 6, or 7 mutations or variants from the germline sequence in a third CDR region. In some instances, sequences generated by the optimization comprise about 1, 2, 3, 4, 5, 6, or 7 mutations or variants from the germline sequence in a first CDR region of a heavy chain. In some instances, sequences generated by the optimization comprise about 1, 2, 3, 4, 5, 6, or 7 mutations or variants from the germline sequence in a second CDR region of a heavy chain. In some instances, sequences generated by the optimization comprise about 1, 2, 3, 4, 5, 6, or 7 mutations or variants from the germline sequence in a third CDR region of a heavy chain. In some instances, sequences generated by the optimization comprise about 1, 2, 3, 4, 5, 6, or 7 mutations or variants from the germline sequence in a first CDR region of a light chain. In some instances, sequences generated by the optimization comprise about 1, 2, 3, 4, 5, 6, or 7 mutations or variants from the germline sequence in a second CDR region of a light chain. In some instances, sequences generated by the optimization comprise about 1, 2, 3, 4, 5, 6, or 7 mutations or variants from the germline sequence in a third CDR region of a light chain. In some instances, a first CDR region is CDR1. In some instances, a second CDR region is CDR2. In some instances, a third CDR region is CDR3.

[0059] VHH Libraries

[0060] Provided herein are methods, compositions, and systems for generation of antibodies or antibody fragments. In some instances, the antibodies or antibody fragments are single domain antibodies. Methods, compositions, and systems described herein for the optimization of antibodies comprise a ratio-variant approach that mirror the natural diversity of antibody sequences. In some instances, libraries of optimized antibodies comprise variant antibody sequences. In some instances, the variant antibody sequences are designed comprising variant CDR regions. In some instances, the variant antibody sequences comprising variant CDR regions are generated by shuffling the natural CDR sequences in a llama, humanized, or chimeric framework. In some instances, such libraries are synthesized, cloned into expression vectors, and translation products (antibodies) evaluated for activity. In some instances, fragments of sequences are synthesized and subsequently assembled. In some instances, expression vectors are used to display and enrich desired antibodies, such as phage display. In some instances, the phage vector is a Fab phagemid vector. Selection pressures used during enrichment in some instances includes, but is not limited to, binding affinity, toxicity, immunological tolerance, stability, receptor-ligand competition, or developability. Such expression vectors allow antibodies with specific properties to be selected (“panning”), and subsequent propagation or amplification of such sequences enriches the library with these sequences. Panning rounds can be repeated any number of times, such as 1, 2, 3, 4, 5, 6, 7, or more than 7 rounds. In some instances, each round of panning involves a number of washes. In some instances, each round of panning involves at least or about 1, 2, 3, 4, 5, 6, 7, 8, 9, 10, 11, 12, 13, 14, 15, 16, or more than 16 washes.

[0061] Described herein are methods and systems of in-silico library design. Libraries as described herein, in some instances, are designed based on a database comprising a variety of antibody sequences. In some instances, the database comprises a plurality of variant antibody sequences against various targets. In some instances, the database comprises at least 100, 500, 1000, 1500, 2000, 2500, 3000, 3500, 4000, 4500, 5000, or more than 5000 antibody sequences. An exemplary database is an iCAN database. In some instances, the database comprises naïve and memory B-cell receptor sequences. In some instances, the naïve and memory B-cell receptor sequences are human, mouse, or primate sequences. In some instances, the naïve and memory B-cell receptor sequences are human sequences. In some instances, the database is analyzed for position specific variation. In some instances, antibodies described herein comprise position specific variations in CDR regions. In some instances, the CDR regions comprise multiple sites for variation.

[0062] Described herein are libraries comprising variation in a CDR region. In some instances, the CDR is CDR1, CDR2, or CDR3 of a variable heavy chain. In some instances, the CDR is CDR1, CDR2, or CDR3 of a variable light chain. In some instances, the libraries comprise multiple variants encoding for CDR1, CDR2, or CDR3. In some instances, the libraries as described herein encode for at least 50, 100, 200, 300, 400, 500, 1000, 1200, 1500, 1700, 2000, 2500, 3000, 3500, 4000, 4500, 5000, or more than 5000 CDR1 sequences. In some instances, the libraries as described herein encode for at least 50, 100, 200, 300, 400, 500, 1000, 1200, 1500, 1700, 2000, 2500, 3000, 3500, 4000, 4500, 5000, or more than 5000 CDR2 sequences. In some instances, the libraries as described herein encode for at least 50, 100, 200, 300, 400, 500, 1000, 1200, 1500, 1700, 2000, 2500, 3000, 3500, 4000, 4500, 5000, or more than 5000 CDR3 sequences. In-silico antibodies libraries are in some instances synthesized, assembled, and enriched for desired sequences.

[0063] Following synthesis of CDR1 variants, CDR2 variants, and CDR3 variants, in some instances, the CDR1 variants, the CDR2 variants, and the CDR3 variants are shuffled to generate a diverse library. In some instances, the diversity of the libraries generated by methods described herein have a theoretical diversity of at least or about 10⁷, 10⁸, 10⁹, 10¹⁰, 10¹¹, 10¹², 10¹³, 10¹⁴, 10¹⁵, 10¹⁶, 10¹⁷, 10¹⁸, or more than 10¹⁸ sequences. In some instances, the library has a final library diversity of at least or about 10⁷, 10⁸, 10⁹, 10¹⁰, 10¹¹, 10¹², 10¹³, 10¹⁴, 10¹⁵, 10¹⁶, 10¹⁷, 10¹⁸, or more than 10¹⁸ sequences.

[0064] The germline sequences corresponding to a variant sequence may also be modified to generate sequences in a library. For example, sequences generated by methods described herein comprise at least 1, 2, 3, 4, 5, 6, 7, 8, 9, 10, 11, 12, 13, 14, 15, 16, or more than 16 mutations or variants from the germline sequence. In some instances, sequences generated comprise no more than 1, 2, 3, 4, 5, 6, 7, 8, 9, 10, 11, 12, 13, 14, 15, 16, or no more than 18 mutations or variants from the germline sequence. In some instances, sequences generated comprise about 1, 2, 3, 4, 5, 6, 7, 8, 9, 10, 11, 12, 13, 14, 15, 16, or about 18 mutations or variants relative to the germline sequence.

[0065] Coronavirus Antibody Libraries

[0066] Provided herein are libraries generated from antibody optimization methods described herein. Antibodies described herein result in improved functional activity, structural stability, expression, specificity, or a combination thereof.

[0067] Provided herein are methods and compositions relating to SARS-CoV-2 binding libraries comprising nucleic acids encoding for a SARS-CoV-2 antibody. Further provided herein are methods and compositions relating to ACE2 binding libraries comprising nucleic acids encoding for an ACE2 antibody. Such methods and compositions in some instances are generated by the antibody optimization methods and systems described herein. Libraries as described herein may be further variegated to provide for variant libraries comprising nucleic acids each encoding for a predetermined variant of at least one predetermined reference nucleic acid sequence. Further described herein are protein libraries that may be generated when the nucleic acid libraries are translated. In some instances, nucleic acid libraries as described herein are transferred into cells to generate a cell library. Also provided herein are downstream applications for the libraries synthesized using methods described herein. Downstream applications include identification of variant nucleic acids or protein sequences with enhanced biologically relevant functions, e.g., improved stability, affinity, binding, functional activity, and for the treatment or prevention of an infection caused by a coronavirus such as SARS-CoV-2.

[0068] In some instances, an antibody or antibody fragment (e.g., multispecific antibody) described herein comprises a sequence of any one as provided in Tables 13-17. In some instances, an antibody or antibody fragment described herein comprises a sequence that is at least 80% identical to a sequence of any one as provided in Tables 13-17. In some instances, an antibody or antibody fragment described herein comprises a sequence that is at least 85% identical to a sequence of any one as provided in Tables 13-17. In some instances, an antibody or antibody fragment described herein comprises a sequence that is at least 90% identical to a sequence of any one as provided in Tables 13-17. In some instances, an antibody or antibody fragment described herein comprises a sequence that is at least 95% identical to a sequence of any one as provided in Tables 13-17.

[0069] In some instances, an antibody or antibody fragment (e.g., multispecific antibody) described herein comprises a sequence of any one of SEQ ID NOs: 1-3193. In some instances, an antibody or antibody fragment described herein comprises a sequence that is at least 80% identical to a sequence of any one of SEQ ID NOs: 1-3193. In some instances, an antibody or antibody fragment described herein comprises a sequence that is at least 85% identical to a sequence of any one of SEQ ID NOs: 1-3193. In some instances, an antibody or antibody fragment described herein comprises a sequence that is at least 90% identical to a sequence of any one of SEQ ID NOs: 1-3193. In some instances, an antibody or antibody fragment described herein comprises a sequence that is at least 95% identical to a sequence of any one of SEQ ID NOs: 1-3193.

[0070] In some instances, an antibody or antibody fragment (e.g., multispecific antibody) described herein comprises a first CDRH1 sequence of any one of SEQ ID NOs: 1-122 and a second CDRH2 sequence of any one of SEQ ID NOs: 123-651. In some instances, an antibody or antibody fragment described herein comprises a sequence that is at least 80% identical to a first CDRH1 sequence of any one of SEQ ID NOs: 1-122 and a second CDRH2 sequence of any one of SEQ ID NOs: 123-651. In some instances, an antibody or antibody fragment described herein comprises a sequence that is at least 85% identical to a first CDRH1 sequence of any one of SEQ ID NOs: 1-122 and a second CDRH2 sequence of any one of SEQ ID NOs: 123-651. In some instances, an antibody or antibody fragment described herein comprises a sequence that is at least 90% identical to a first CDRH1 sequence of any one of SEQ ID NOs: 1-89 and a second CDRH2 sequence of any one of SEQ ID NOs: 123-651. In some instances, an antibody or antibody fragment described herein comprises a sequence that is at least 95% identical to a first CDRH1 sequence of any one of SEQ ID NOs: 1-122 and a second CDRH2 sequence of any one of SEQ ID NOs: 123-651. In some instances, an antibody or antibody fragment described herein comprises a first CDRH2 sequence of any one of SEQ ID NOs: 652-773 and a second CDRH2 sequence of any one of SEQ ID NOs: 774-1302. In some instances, an antibody or antibody fragment described herein comprises a sequence that is at least 80% identical to first CDRH2 sequence of any one of SEQ ID NOs: 652-773 and a second CDRH2 sequence of any one of SEQ ID NOs: 774-1302. In some instances, an antibody or antibody fragment described herein comprises a sequence that is at least 85% identical to first CDRH2 sequence of any one of SEQ ID NOs: 652-773 and a second CDRH2 sequence of any one of SEQ ID NOs: 774-1302. In some instances, an antibody or antibody fragment described herein comprises a sequence that is at least 90% identical to a first CDRH2 sequence of any one of SEQ ID NOs: 652-773 and a second CDRH2 sequence of any one of SEQ ID NOs: 774-1302. In some instances, an antibody or antibody fragment described herein comprises a sequence that is at least 95% identical to a first CDRH2 sequence of any one of SEQ ID NOs: 652-773 and a second CDRH2 sequence of any one of SEQ ID NOs: 774-1302. In some instances, an antibody or antibody fragment described herein comprises a first CDRH3 sequence of any one of SEQ ID NOs: 1303-1425 and a second CDRH3 sequence of any one of SEQ ID NOs: 1426-1953. In some instances, an antibody or antibody fragment described herein comprises a sequence that is at least 80% identical to a first CDRH3 sequence of any one of SEQ ID NOs: 1303-1425 and a second CDRH3 sequence of any one of SEQ ID NOs: 1426-1953. In some instances, an antibody or antibody fragment described herein comprises a sequence that is at least 85% identical to a first CDRH3 sequence of any one of SEQ ID NOs: 1303-1425 and a second CDRH3 sequence of any one of SEQ ID NOs: 1426-1953. In some instances, an antibody or antibody fragment described herein comprises a sequence that is at least 90% identical to a first CDRH3 sequence of any one of SEQ ID NOs: 1303-1425 and a second CDRH3 sequence of any one of SEQ ID NOs: 1426-1953. In some instances, an antibody or antibody fragment described herein comprises a sequence that is at least 95% identical a first CDRH3 sequence of any one of SEQ ID NOs: 1303-1425 and a second CDRH3 sequence of any one of SEQ ID NOs: 1426-1953.

[0071] Described herein, in some embodiments, are antibodies or antibody fragments (e.g., multispecific antibodies) comprising a first variable domain, heavy chain region (VH) comprising an amino acid sequence at least about 90% identical to a sequence as set forth in any one of SEQ ID NOs: 2212-2333, and a second VH comprising an amino acid sequence at least about 90% identical to a sequence as set forth in any one of SEQ ID NOs: 2334-3099. In some instances, the antibodies or antibody fragments comprise a first VH comprising at least or about 70%, 80%, 85%, 90%, 91%, 92%, 93%, 94%, 95%, 96%, 97%, 98%, 99%, or 100% sequence identity to any one of SEQ ID NOs: 2212-2333, and a second VH comprising at least or about 70%, 80%, 85%, 90%, 91%, 92%, 93%, 94%, 95%, 96%, 97%, 98%, 99%, or 100% sequence identity to any one of SEQ ID NOs: 2334-3099.

[0072] Described herein, in some embodiments, are antibodies or antibody fragments (e.g., multispecific antibodies) comprising an amino acid sequence at least about 90% identical to a sequence as set forth SEQ ID NO: 3192. In some instances, the antibodies or antibody fragments comprise an amino acid sequence at least or about 70%, 80%, 85%, 90%, 91%, 92%, 93%, 94%, 95%, 96%, 97%, 98%, 99%, or 100% sequence identity to SEQ ID NO: 3192.

[0073] Described herein, in some embodiments, are antibodies or antibody fragments (e.g., multispecific antibodies) comprising an amino acid sequence at least about 90% identical to a sequence as set forth SEQ ID NO: 3193. In some instances, the antibodies or antibody fragments comprise an amino acid sequence at least or about 70%, 80%, 85%, 90%, 91%, 92%, 93%, 94%, 95%, 96%, 97%, 98%, 99%, or 100% sequence identity to SEQ ID NO: 3193.

[0074] The term “sequence identity” means that two polynucleotide sequences are identical (i.e., on a nucleotide-by-nucleotide basis) over the window of comparison. The term “percentage of sequence identity” is calculated by comparing two optimally aligned sequences over the window of comparison, determining the number of positions at which the identical nucleic acid base (e.g., A, T, C, G, U, or I) occurs in both sequences to yield the number of matched positions, dividing the number of matched positions by the total number of positions in the window of comparison (i.e., the window size), and multiplying the result by 100 to yield the percentage of sequence identity.

[0075] The term “homology” or “similarity” between two proteins is determined by comparing the amino acid sequence and its conserved amino acid substitutes of one protein sequence to the second protein sequence. Similarity may be determined by procedures which are well-known in the art, for example, a BLAST program (Basic Local Alignment Search Tool at the National Center for Biological Information).

[0076] Provided herein are libraries comprising nucleic acids encoding for SARS-CoV-2 antibodies. Antibodies described herein allow for improved stability for a range of SARS-CoV-2 or ACE2 binding domain encoding sequences. In some instances, the binding domain encoding sequences are determined by interactions between SARS-CoV-2 and ACE2.

[0077] Sequences of binding domains based on surface interactions between SARS-CoV-2 and ACE2 are analyzed using various methods. For example, multispecies computational analysis is performed. In some instances, a structure analysis is performed. In some instances, a sequence analysis is performed. Sequence analysis can be performed using a database known in the art. Non-limiting examples of databases include, but are not limited to, NCBI BLAST (blast.ncbi.nlm.nih.gov/Blast.cgi), UCSC Genome Browser (genome.ucsc.edu/), UniProt (www.uniprot.org/), and IUPHAR/BPS Guide to PHARMACOLOGY (guidetopharmacology.org/).

[0078] Described herein are SARS-CoV-2 or ACE2 binding domains designed based on sequence analysis among various organisms. For example, sequence analysis is performed to identify homologous sequences in different organisms. Exemplary organisms include, but are not limited to, mouse, rat, equine, sheep, cow, primate (e.g., chimpanzee, baboon, gorilla, orangutan, monkey), dog, cat, pig, donkey, rabbit, fish, fly, and human. In some instances, homologous sequences are identified in the same organism, across individuals.

[0079] Following identification of SARS-CoV-2 or ACE2 binding domains, libraries comprising nucleic acids encoding for the SARS-CoV-2 or ACE2 binding domains may be generated. In some instances, libraries of SARS-CoV-2 or ACE2 binding domains comprise sequences of SARS-CoV-2 or ACE2 binding domains designed based on conformational ligand interactions, peptide ligand interactions, small molecule ligand interactions, extracellular domains of SARS-CoV-2 or ACE2, or antibodies that target SARS-CoV-2 or ACE2. Libraries of SARS-CoV-2 or ACE2 binding domains may be translated to generate protein libraries. In some instances, libraries of SARS-CoV-2 or ACE2 binding domains are translated to generate peptide libraries, immunoglobulin libraries, derivatives thereof, or combinations thereof. In some instances, libraries of SARS-CoV-2 or ACE2 binding domains are translated to generate protein libraries that are further modified to generate peptidomimetic libraries. In some instances, libraries of SARS-CoV-2 or ACE2 binding domains are translated to generate protein libraries that are used to generate small molecules.

[0080] Methods described herein provide for synthesis of libraries of SARS-CoV-2 or ACE2 binding domains comprising nucleic acids each encoding for a predetermined variant of at least one predetermined reference nucleic acid sequence. In some cases, the predetermined reference sequence is a nucleic acid sequence encoding for a protein, and the variant library comprises sequences encoding for variation of at least a single codon such that a plurality of different variants of a single residue in the subsequent protein encoded by the synthesized nucleic acid are generated by standard translation processes. In some instances, the libraries of SARS-CoV-2 or ACE2 binding domains comprise varied nucleic acids collectively encoding variations at multiple positions. In some instances, the variant library comprises sequences encoding for variation of at least a single codon in a SARS-CoV-2 or ACE2 binding domain. In some instances, the variant library comprises sequences encoding for variation of multiple codons in a SARS-CoV-2 or ACE2 binding domain. An exemplary number of codons for variation include, but are not limited to, at least or about 1, 5, 10, 15, 20, 25, 30, 35, 40, 45, 50, 55, 60, 65, 70, 75, 80, 85, 90, 95, 100, 125, 150, 175, 225, 250, 275, 300, or more than 300 codons.

[0081] Methods described herein provide for synthesis of libraries comprising nucleic acids encoding for the SARS-CoV-2 or ACE2 binding domains, wherein the libraries comprise sequences encoding for variation of length of the SARS-CoV-2 or ACE2 binding domains. In some instances, the library comprises sequences encoding for variation of length of at least or about 1, 5, 10, 15, 20, 25, 30, 35, 40, 45, 50, 55, 60, 65, 70, 75, 80, 85, 90, 95, 100, 125, 150, 175, 225, 250, 275, 300, or more than 300 codons less as compared to a predetermined reference sequence. In some instances, the library comprises sequences encoding for variation of length of at least or about 1, 5, 10, 15, 20, 25, 30, 35, 40, 45, 50, 55, 60, 65, 70, 75, 80, 85, 90, 95, 100, 125, 150, 175, 200, 225, 250, 275, 300, or more than 300 codons more as compared to a predetermined reference sequence.

[0082] Following identification of SARS-CoV-2 or ACE2 binding domains, antibodies may be designed and synthesized to comprise the SARS-CoV-2 or ACE2 binding domains. Antibodies comprising SARS-CoV-2 or ACE2 binding domains may be designed based on binding, specificity, stability, expression, folding, or downstream activity. In some instances, the antibodies comprising SARS-CoV-2 or ACE2 binding domains enable contact with the SARS-CoV-2 or ACE2. In some instances, the antibodies comprising SARS-CoV-2 or ACE2 binding domains enables high affinity binding with the SARS-CoV-2 or ACE2. Exemplary amino acid sequences of SARS-CoV-2 or ACE2 binding domains comprise any one of SEQ ID NOs: 1-3193.

[0083] In some instances, the SARS-CoV-2 antibody comprises a binding affinity (e.g., K_{D}) to SARS-CoV-2 of less than 1 nM, less than 1.2 nM, less than 2 nM, less than 5 nM, less than 10 nM, less than 11 nm, less than 13.5 nM, less than 15 nM, less than 20 nM, less than 25 nM, or less than 30 nM. In some instances, the SARS-CoV-2 antibody comprises a K_{D} of less than 1 nM. In some instances, the SARS-CoV-2 antibody comprises a K_{D} of less than 1.2 nM. In some instances, the SARS-CoV-2 antibody comprises a K_{D} of less than 2 nM. In some instances, the SARS-CoV-2 antibody comprises a K_{D} of less than 5 nM. In some instances, the SARS-CoV-2 antibody comprises a K_{D} of less than 10 nM. In some instances, the SARS-CoV-2 antibody comprises a K_{D} of less than 13.5 nM. In some instances, the SARS-CoV-2 antibody comprises a K_{D} of less than 15 nM. In some instances, the SARS-CoV-2 antibody comprises a K_{D} of less than 20 nM. In some instances, the SARS-CoV-2 antibody comprises a K_{D} of less than 25 nM. In some instances, the SARS-CoV-2 antibody comprises a K_{D} of less than 30 nM.

[0084] In some instances, the ACE2 antibody comprises a binding affinity (e.g., K_{D}) to ACE2 of less than 1 nM, less than 1.2 nM, less than 2 nM, less than 5 nM, less than 10 nM, less than 11 nm, less than 13.5 nM, less than 15 nM, less than 20 nM, less than 25 nM, or less than 30 nM. In some instances, the ACE2 antibody comprises a K_{D} of less than 1 nM. In some instances, the ACE2 antibody comprises a K_{D} of less than 1.2 nM. In some instances, the ACE2 antibody comprises a K_{D} of less than 2 nM. In some instances, the ACE2 antibody comprises a K_{D} of less than 5 nM. In some instances, the ACE2 antibody comprises a K_{D} of less than 10 nM. In some instances, the ACE2 antibody comprises a K_{D} of less than 13.5 nM. In some instances, the ACE2 antibody comprises a K_{D} of less than 15 nM. In some instances, the ACE2 antibody comprises a K_{D} of less than 20 nM. In some instances, the ACE2 antibody comprises a K_{D} of less than 25 nM. In some instances, the ACE2 antibody comprises a K_{D} of less than 30 nM.

[0085] In some instances, the SARS-CoV-2 or ACE2 immunoglobulin is an agonist. In some instances, the SARS-CoV-2 or ACE2 immunoglobulin is an antagonist. In some instances, the SARS-CoV-2 or ACE2 immunoglobulin is an allosteric modulator. In some instances, the allosteric modulator is a negative allosteric modulator. In some instances, the allosteric modulator is a positive allosteric modulator. In some instances, the SARS-CoV-2 or ACE2 immunoglobulin results in agonistic, antagonistic, or allosteric effects at a concentration of at least or about 1 nM, 2 nM, 4 nM, 6 nM, 8 nM, 10 nM, 20 nM, 30 nM, 40 nM, 50 nM, 60 nM, 70 nM, 80 nM, 90 nM, 100 nM, 120 nM, 140 nM, 160 nM, 180 nM, 200 nM, 300 nM, 400 nM, 500 nM, 600 nM, 700 nM, 800 nM, 900 nM, 1000 nM, or more than 1000 nM. In some instances, the SARS-CoV-2 or ACE2 immunoglobulin is a negative allosteric modulator. In some instances, the SARS-CoV-2 or ACE2 immunoglobulin is a negative allosteric modulator at a concentration of at least or about 0.001, 0.005, 0.01, 0.05, 0.1, 0.5, 1 nM, 2 nM, 4 nM, 6 nM, 8 nM, 10 nM, 20 nM, 30 nM, 40 nM, 50 nM, 60 nM, 70 nM, 80 nM, 90 nM, 100 nM, or more than 100 nM. In some instances, the SARS-CoV-2 or ACE2 immunoglobulin is a negative allosteric modulator at a concentration in a range of about 0.001 to about 100, 0.01 to about 90, about 0.1 to about 80, 1 to about 50, about 10 to about 40 nM, or about 1 to about 10 nM. In some instances, the SARS-CoV-2 or ACE2 immunoglobulin comprises an EC50 or IC50 of at least or about 0.001, 0.0025, 0.005, 0.01, 0.025, 0.05, 0.06, 0.07, 0.08, 0.9, 0.1, 0.5, 1, 2, 3, 4, 5, 6, or more than 6 nM. In some instances, the SARS-CoV-2 or ACE2 immunoglobulin comprises an EC50 or IC50 of at least or about 1 nM, 2 nM, 4 nM, 6 nM, 8 nM, 10 nM, 20 nM, 30 nM, 40 nM, 50 nM, 60 nM, 70 nM, 80 nM, 90 nM, 100 nM, or more than 100 nM.

[0086] In some instances, the affinity of the SARS-CoV-2 or ACE2 antibody generated by methods as described herein is at least or about 1.5×, 2.0×, 5×, 10×, 20×, 30×, 40×, 50×, 60×, 70×, 80×, 90×, 100×, 200×, or more than 200×improved binding affinity as compared to a comparator antibody. In some instances, the SARS-CoV-2 or ACE2 antibody generated by methods as described herein is at least or about 1.5×, 2.0×, 5×, 10×, 20×, 30×, 40×, 50×, 60×, 70×, 80×, 90×, 100×, 200×, or more than 200×improved function as compared to a comparator antibody. In some instances, the comparator antibody is an antibody with similar structure, sequence, or antigen target.

[0087] Provided herein are SARS-CoV-2 or ACE2 binding libraries comprising nucleic acids encoding for antibodies comprising SARS-CoV-2 or ACE2 binding domains comprise variation in domain type, domain length, or residue variation. In some instances, the domain is a region in the antibody comprising the SARS-CoV-2 or ACE2 binding domains. For example, the region is the VH, CDRH3, or VL domain. In some instances, the domain is the SARS-CoV-2 or ACE2 binding domain.

[0088] Methods described herein provide for synthesis of a SARS-CoV-2 or ACE21 binding library of nucleic acids each encoding for a predetermined variant of at least one predetermined reference nucleic acid sequence. In some cases, the predetermined reference sequence is a nucleic acid sequence encoding for a protein, and the variant library comprises sequences encoding for variation of at least a single codon such that a plurality of different variants of a single residue in the subsequent protein encoded by the synthesized nucleic acid are generated by standard translation processes. In some instances, the SARS-CoV-2 or ACE2 binding library comprises varied nucleic acids collectively encoding variations at multiple positions. In some instances, the variant library comprises sequences encoding for variation of at least a single codon of a VH or VL domain. In some instances, the variant library comprises sequences encoding for variation of at least a single codon in a SARS-CoV-2 or ACE2 binding domain. For example, at least one single codon of a SARS-CoV-2 or ACE2 binding domain is varied. In some instances, the variant library comprises sequences encoding for variation of multiple codons of a VH or VL domain. In some instances, the variant library comprises sequences encoding for variation of multiple codons in a SARS-CoV-2 or ACE2 binding domain. An exemplary number of codons for variation include, but are not limited to, at least or about 1, 5, 10, 15, 20, 25, 30, 35, 40, 45, 50, 55, 60, 65, 70, 75, 80, 85, 90, 95, 100, 125, 150, 175, 225, 250, 275, 300, or more than 300 codons.

[0089] Methods described herein provide for synthesis of a SARS-CoV-2 or ACE2 binding library of nucleic acids each encoding for a predetermined variant of at least one predetermined reference nucleic acid sequence, wherein the SARS-CoV-2 or ACE2 binding library comprises sequences encoding for variation of length of a domain. In some instances, the domain is VH or VL domain. In some instances, the domain is the SARS-CoV-2 or ACE2 binding domain. In some instances, the library comprises sequences encoding for variation of length of at least or about 1, 5, 10, 15, 20, 25, 30, 35, 40, 45, 50, 55, 60, 65, 70, 75, 80, 85, 90, 95, 100, 125, 150, 175, 225, 250, 275, 300, or more than 300 codons less as compared to a predetermined reference sequence. In some instances, the library comprises sequences encoding for variation of length of at least or about 1, 5, 10, 15, 20, 25, 30, 35, 40, 45, 50, 55, 60, 65, 70, 75, 80, 85, 90, 95, 100, 125, 150, 175, 200, 225, 250, 275, 300, or more than 300 codons more as compared to a predetermined reference sequence.

[0090] Provided herein are SARS-CoV-2 or ACE2 binding libraries comprising nucleic acids encoding for antibodies comprising SARS-CoV-2 or ACE2 binding domains, wherein the SARS-CoV-2 or ACE2 binding libraries are synthesized with various numbers of fragments. In some instances, the fragments comprise the VH or VL domain. In some instances, the SARS-CoV-2 or ACE2 binding libraries are synthesized with at least or about 2 fragments, 3 fragments, 4 fragments, 5 fragments, or more than 5 fragments. The length of each of the nucleic acid fragments or average length of the nucleic acids synthesized may be at least or about 50, 75, 100, 125, 150, 175, 200, 225, 250, 275, 300, 325, 350, 375, 400, 425, 450, 475, 500, 525, 550, 575, 600, or more than 600 base pairs. In some instances, the length is about 50 to 600, 75 to 575, 100 to 550, 125 to 525, 150 to 500, 175 to 475, 200 to 450, 225 to 425, 250 to 400, 275 to 375, or 300 to 350 base pairs.

[0091] SARS-CoV-2 or ACE2 binding libraries comprising nucleic acids encoding for antibodies comprising SARS-CoV-2 or ACE2 binding domains as described herein comprise various lengths of amino acids when translated. In some instances, the length of each of the amino acid fragments or average length of the amino acid synthesized may be at least or about 15, 20, 25, 30, 35, 40, 45, 50, 55, 60, 65, 70, 75, 80, 85, 90, 95, 100, 105, 110, 115, 120, 125, 130, 135, 140, 145, 150, or more than 150 amino acids. In some instances, the length of the amino acid is about 15 to 150, 20 to 145, 25 to 140, 30 to 135, 35 to 130, 40 to 125, 45 to 120, 50 to 115, 55 to 110, 60 to 110, 65 to 105, 70 to 100, or 75 to 95 amino acids. In some instances, the length of the amino acid is about 22 to about 75 amino acids.

[0092] SARS-CoV-2 or ACE2 binding libraries comprising de novo synthesized variant sequences encoding for antibodies comprising SARS-CoV-2 or ACE2 binding domains comprise a number of variant sequences. In some instances, a number of variant sequences is de novo synthesized for a CDRH1, CDRH2, CDRH3, CDRL1, CDRL2, CDRL3, VL, VH, or a combination thereof. In some instances, a number of variant sequences is de novo synthesized for framework element 1 (FW1), framework element 2 (FW2), framework element 3 (FW3), or framework element 4 (FW4). In some instances, a number of variant sequences are de novo synthesized for a SARS-CoV-2 or ACE2 binding domain. The number of variant sequences may be at least or about 5, 10, 15, 20, 25, 30, 35, 40, 45, 50, 55, 60, 65, 70, 75, 80, 85, 90, 95, 100, 125, 150, 175, 200, 225, 250, 275, 300, 325, 350, 375, 400, 425, 450, 475, 500, or more than 500 sequences. In some instances, the number of variant sequences is about 10 to 300, 25 to 275, 50 to 250, 75 to 225, 100 to 200, or 125 to 150 sequences.

[0093] SARS-CoV-2 or ACE2 binding libraries comprising de novo synthesized variant sequences encoding for antibodies comprising SARS-CoV-2 or ACE2 binding domains comprise improved diversity. In some instances, variants include affinity maturation variants. Alternatively or in combination, variants include variants in other regions of the antibody including, but not limited to, CDRH1, CDRH2, CDRL1, CDRL2, and CDRL3. In some instances, the number of variants of the SARS-CoV-2 or ACE2 binding libraries is least or about 10⁴, 10⁵, 10⁶, 10⁷, 10⁸, 10⁹, 10¹⁰, 10¹¹, 10¹², 10¹³, 10¹⁴ or more than 10¹⁴ non-identical sequences.

[0094] Following synthesis of SARS-CoV-2 or ACE2 binding libraries comprising nucleic acids encoding antibodies comprising SARS-CoV-2 or ACE2 binding domains, libraries may be used for screening and analysis. For example, libraries are assayed for library displayability and panning. In some instances, displayability is assayed using a selectable tag. Exemplary tags include, but are not limited to, a radioactive label, a fluorescent label, an enzyme, a chemiluminescent tag, a colorimetric tag, an affinity tag or other labels or tags that are known in the art. In some instances, the tag is histidine, polyhistidine, myc, hemagglutinin (HA), or FLAG. For example, SARS-CoV-2 or ACE2 binding libraries comprise nucleic acids encoding antibodies comprising SARS-CoV-2 or ACE2 binding domains with multiple tags such as GFP, FLAG, and Lucy as well as a DNA barcode. In some instances, libraries are assayed by sequencing using various methods including, but not limited to, single-molecule real-time (SMRT) sequencing, Polony sequencing, sequencing by ligation, reversible terminator sequencing, proton detection sequencing, ion semiconductor sequencing, nanopore sequencing, electronic sequencing, pyrosequencing, Maxam-Gilbert sequencing, chain termination (e.g., Sanger) sequencing, +S sequencing, or sequencing by synthesis.

[0095] As used herein, the term antibody will be understood to include proteins having the characteristic two-armed, Y-shape of a typical antibody molecule as well as one or more fragments of an antibody that retain the ability to specifically bind to an antigen. Exemplary antibodies include, but are not limited to, a monoclonal antibody, a polyclonal antibody, a bi-specific antibody, a multispecific antibody, a grafted antibody, a human antibody, a humanized antibody, a synthetic antibody, a chimeric antibody, a camelized antibody, a single-chain Fvs (scFv) (including fragments in which the VL and VH are joined using recombinant methods by a synthetic or natural linker that enables them to be made as a single protein chain in which the VL and VH regions pair to form monovalent molecules, including single chain Fab and scFab), a single chain antibody, a Fab fragment (including monovalent fragments comprising the VL, VH, CL, and CH1 domains), a F(ab′)2 fragment (including bivalent fragments comprising two Fab fragments linked by a disulfide bridge at the hinge region), a Fd fragment (including fragments comprising the VH and CH1 fragment), a Fv fragment (including fragments comprising the VL and VH domains of a single arm of an antibody), a single-domain antibody (dAb or sdAb) (including fragments comprising a VH domain), an isolated complementarity determining region (CDR), a diabody (including fragments comprising bivalent dimers such as two VL and VH domains bound to each other and recognizing two different antigens), a fragment comprised of only a single monomeric variable domain, disulfide-linked Fvs (sdFv), an intrabody, an anti-idiotypic (anti-Id) antibody, or ab antigen-binding fragments thereof. In some instances, the libraries disclosed herein comprise nucleic acids encoding for an antibody, wherein the antibody is a Fv antibody, including Fv antibodies comprised of the minimum antibody fragment which contains a complete antigen-recognition and antigen-binding site. In some embodiments, the Fv antibody consists of a dimer of one heavy chain and one light chain variable domain in tight, non-covalent association, and the three hypervariable regions of each variable domain interact to define an antigen-binding site on the surface of the VH-VL dimer. In some embodiments, the six hypervariable regions confer antigen-binding specificity to the antibody. In some embodiments, a single variable domain (or half of an Fv comprising only three hypervariable regions specific for an antigen, including single domain antibodies isolated from camelid animals comprising one heavy chain variable domain such as VHH antibodies or nanobodies) has the ability to recognize and bind antigen. In some instances, the libraries disclosed herein comprise nucleic acids encoding for an antibody, wherein the antibody is a single-chain Fv or scFv, including antibody fragments comprising a VH, a VL, or both a VH and VL domain, wherein both domains are present in a single polypeptide chain. In some embodiments, the Fv polypeptide further comprises a polypeptide linker between the VH and VL domains allowing the scFv to form the desired structure for antigen binding. In some instances, a scFv is linked to the Fc fragment or a VHH is linked to the Fc fragment (including minibodies). In some instances, the antibody comprises immunoglobulin molecules and immunologically active fragments of immunoglobulin molecules, e.g., molecules that contain an antigen binding site. Immunoglobulin molecules are of any type (e.g., IgG, IgE, IgM, IgD, IgA and IgY), class (e.g., IgG 1, IgG 2, IgG 3, IgG 4, IgA 1 and IgA 2) or subclass.

[0096] In some embodiments, the antibody is a multivalent antibody. In some embodiments, the antibody is a monovalent, bivalent, or multivalent antibody. In some instances, the antibody is monospecific, bispecific, or multispecific. In some embodiments, the antibody is monovalent monospecific, monovalent bispecific, monovalent multispecific, bivalent monospecific, bivalent bispecific, bivalent multispecific, multivalent monospecific, multivalent bispecific, multivalent multispecific. In some instances, the antibody is homodimeric, heterodimeric, or heterotrimeric.

[0097] In some embodiments, libraries comprise immunoglobulins that are adapted to the species of an intended therapeutic target. Generally, these methods include “mammalization” and comprises methods for transferring donor antigen-binding information to a less immunogenic mammal antibody acceptor to generate useful therapeutic treatments. In some instances, the mammal is mouse, rat, equine, sheep, cow, primate (e.g., chimpanzee, baboon, gorilla, orangutan, monkey), dog, cat, pig, donkey, rabbit, and human. In some instances, provided herein are libraries and methods for felinization and caninization of antibodies.

[0098] “Humanized” forms of non-human antibodies can be chimeric antibodies that contain minimal sequence derived from the non-human antibody. A humanized antibody is generally a human antibody (recipient antibody) in which residues from one or more CDRs are replaced by residues from one or more CDRs of a non-human antibody (donor antibody). The donor antibody can be any suitable non-human antibody, such as a mouse, rat, rabbit, chicken, or non-human primate antibody having a desired specificity, affinity, or biological effect. In some instances, selected framework region residues of the recipient antibody are replaced by the corresponding framework region residues from the donor antibody. Humanized antibodies may also comprise residues that are not found in either the recipient antibody or the donor antibody. In some instances, these modifications are made to further refine antibody performance.

[0099] “Caninization” can comprise a method for transferring non-canine antigen-binding information from a donor antibody to a less immunogenic canine antibody acceptor to generate treatments useful as therapeutics in dogs. In some instances, caninized forms of non-canine antibodies provided herein are chimeric antibodies that contain minimal sequence derived from non-canine antibodies. In some instances, caninized antibodies are canine antibody sequences (“acceptor” or “recipient” antibody) in which hypervariable region residues of the recipient are replaced by hypervariable region residues from a non-canine species (“donor” antibody) such as mouse, rat, rabbit, cat, dogs, goat, chicken, bovine, horse, llama, camel, dromedaries, sharks, non-human primates, human, humanized, recombinant sequence, or an engineered sequence having the desired properties. In some instances, framework region (FR) residues of the canine antibody are replaced by corresponding non-canine FR residues. In some instances, caninized antibodies include residues that are not found in the recipient antibody or in the donor antibody. In some instances, these modifications are made to further refine antibody performance. The caninized antibody may also comprise at least a portion of an immunoglobulin constant region (Fc) of a canine antibody.

[0100] “Felinization” can comprise a method for transferring non-feline antigen-binding information from a donor antibody to a less immunogenic feline antibody acceptor to generate treatments useful as therapeutics in cats. In some instances, felinized forms of non-feline antibodies provided herein are chimeric antibodies that contain minimal sequence derived from non-feline antibodies. In some instances, felinized antibodies are feline antibody sequences (“acceptor” or “recipient” antibody) in which hypervariable region residues of the recipient are replaced by hypervariable region residues from a non-feline species (“donor” antibody) such as mouse, rat, rabbit, cat, dogs, goat, chicken, bovine, horse, llama, camel, dromedaries, sharks, non-human primates, human, humanized, recombinant sequence, or an engineered sequence having the desired properties. In some instances, framework region (FR) residues of the feline antibody are replaced by corresponding non-feline FR residues. In some instances, felinized antibodies include residues that are not found in the recipient antibody or in the donor antibody. In some instances, these modifications are made to further refine antibody performance. The felinized antibody may also comprise at least a portion of an immunoglobulin constant region (Fc) of a felinize antibody.

[0101] Methods as described herein may be used for optimization of libraries encoding a non-immunoglobulin. In some instances, the libraries comprise antibody mimetics. Exemplary antibody mimetics include, but are not limited to, anticalins, affilins, affibody molecules, affimers, affitins, alphabodies, avimers, atrimers, DARPins, fynomers, Kunitz domain-based proteins, monobodies, anticalins, knottins, armadillo repeat protein-based proteins, and bicyclic peptides.

[0102] Libraries described herein comprising nucleic acids encoding for an antibody comprise variations in at least one region of the antibody. Exemplary regions of the antibody for variation include, but are not limited to, a complementarity-determining region (CDR), a variable domain, or a constant domain. In some instances, the CDR is CDR1, CDR2, or CDR3. In some instances, the CDR is a heavy domain including, but not limited to, CDRH1, CDRH2, and CDRH3. In some instances, the CDR is a light domain including, but not limited to, CDRL1, CDRL2, and CDRL3. In some instances, the variable domain is variable domain, light chain (VL) or variable domain, heavy chain (VH). In some instances, the VL domain comprises kappa or lambda chains. In some instances, the constant domain is constant domain, light chain (CL) or constant domain, heavy chain (CH).

[0103] Methods described herein provide for synthesis of libraries comprising nucleic acids encoding an antibody, wherein each nucleic acid encodes for a predetermined variant of at least one predetermined reference nucleic acid sequence. In some cases, the predetermined reference sequence is a nucleic acid sequence encoding for a protein, and the variant library comprises sequences encoding for variation of at least a single codon such that a plurality of different variants of a single residue in the subsequent protein encoded by the synthesized nucleic acid are generated by standard translation processes. In some instances, the antibody library comprises varied nucleic acids collectively encoding variations at multiple positions. In some instances, the variant library comprises sequences encoding for variation of at least a single codon of a CDRH1, CDRH2, CDRH3, CDRL1, CDRL2, CDRL3, VL, or VH domain. In some instances, the variant library comprises sequences encoding for variation of multiple codons of a CDRH1, CDRH2, CDRH3, CDRL1, CDRL2, CDRL3, VL, or VH domain. In some instances, the variant library comprises sequences encoding for variation of multiple codons of framework element 1 (FW1), framework element 2 (FW2), framework element 3 (FW3), or framework element 4 (FW4). An exemplary number of codons for variation include, but are not limited to, at least or about 1, 5, 10, 15, 20, 25, 30, 35, 40, 45, 50, 55, 60, 65, 70, 75, 80, 85, 90, 95, 100, 125, 150, 175, 225, 250, 275, 300, or more than 300 codons.

[0104] In some instances, the at least one region of the antibody for variation is from heavy chain V-gene family, heavy chain D-gene family, heavy chain J-gene family, light chain V-gene family, or light chain J-gene family. In some instances, the light chain V-gene family comprises immunoglobulin kappa (IGK) gene or immunoglobulin lambda (IGL). Exemplary regions of the antibody for variation include, but are not limited to, IGHV1-18, IGHV1-69, IGHV1-8, IGHV3-21, IGHV3-23, IGHV3-30/33rn, IGHV3-28, IGHV1-69, IGHV3-74, IGHV4-39, IGHV4-59/61, IGKV1-39, IGKV1-9, IGKV2-28, IGKV3-11, IGKV3-15, IGKV3-20, IGKV4-1, IGLV1-51, IGLV2-14, IGLV1-40, and IGLV3-1. In some instances, the gene is IGHV1-69, IGHV3-30, IGHV3-23, IGHV3, IGHV1-46, IGHV3-7, IGHV1, or IGHV1-8. In some instances, the gene is IGHV1-69 and IGHV3-30. In some instances, the region of the antibody for variation is IGHJ3, IGHJ6, IGHJ, IGHJ4, IGHJ5, IGHJ2, or IGH1. In some instances, the region of the antibody for variation is IGHJ3, IGHJ6, IGHJ, or IGHJ4. In some instances, the at least one region of the antibody for variation is IGHV1-69, IGHV3-23, IGKV3-20, IGKV1-39, or combinations thereof. In some instances, the at least one region of the antibody for variation is IGHV1-69 and IGKV3-20, In some instances, the at least one region of the antibody for variation is IGHV1-69 and IGKV1-39. In some instances, the at least one region of the antibody for variation is IGHV3-23 and IGKV3-20. In some instances, the at least one region of the antibody for variation is IGHV3-23 and IGKV1-39.

[0105] Provided herein are libraries comprising nucleic acids encoding for antibodies, wherein the libraries are synthesized with various numbers of fragments. In some instances, the fragments comprise the CDRH1, CDRH2, CDRH3, CDRL1, CDRL2, CDRL3, VL, or VH domain. In some instances, the fragments comprise framework element 1 (FW1), framework element 2 (FW2), framework element 3 (FW3), or framework element 4 (FW4). In some instances, the antibody libraries are synthesized with at least or about 2 fragments, 3 fragments, 4 fragments, 5 fragments, or more than 5 fragments. The length of each of the nucleic acid fragments or average length of the nucleic acids synthesized may be at least or about 50, 75, 100, 125, 150, 175, 200, 225, 250, 275, 300, 325, 350, 375, 400, 425, 450, 475, 500, 525, 550, 575, 600, or more than 600 base pairs. In some instances, the length is about 50 to 600, 75 to 575, 100 to 550, 125 to 525, 150 to 500, 175 to 475, 200 to 450, 225 to 425, 250 to 400, 275 to 375, or 300 to 350 base pairs.

[0106] Libraries comprising nucleic acids encoding for antibodies as described herein comprise various lengths of amino acids when translated. In some instances, the length of each of the amino acid fragments or average length of the amino acid synthesized may be at least or about 15, 20, 25, 30, 35, 40, 45, 50, 55, 60, 65, 70, 75, 80, 85, 90, 95, 100, 105, 110, 115, 120, 125, 130, 135, 140, 145, 150, or more than 150 amino acids. In some instances, the length of the amino acid is about 15 to 150, 20 to 145, 25 to 140, 30 to 135, 35 to 130, 40 to 125, 45 to 120, 50 to 115, 55 to 110, 60 to 110, 65 to 105, 70 to 100, or 75 to 95 amino acids. In some instances, the length of the amino acid is about 22 amino acids to about 75 amino acids. In some instances, the antibodies comprise at least or about 100, 200, 300, 400, 500, 600, 700, 800, 900, 1000, 2000, 3000, 4000, 5000, or more than 5000 amino acids.

[0107] A number of variant sequences for the at least one region of the antibody for variation are de novo synthesized using methods as described herein. In some instances, a number of variant sequences is de novo synthesized for CDRH1, CDRH2, CDRH3, CDRL1, CDRL2, CDRL3, VL, VH, or combinations thereof. In some instances, a number of variant sequences is de novo synthesized for framework element 1 (FW1), framework element 2 (FW2), framework element 3 (FW3), or framework element 4 (FW4). The number of variant sequences may be at least or about 5, 10, 15, 20, 25, 30, 35, 40, 45, 50, 55, 60, 65, 70, 75, 80, 85, 90, 95, 100, 125, 150, 175, 200, 225, 250, 275, 300, 325, 350, 375, 400, 425, 450, 475, 500, or more than 500 sequences. In some instances, the number of variant sequences is at least or about 500, 600, 700, 800, 900, 1000, 2000, 3000, 4000, 5000, 6000, 7000, 8000, or more than 8000 sequences. In some instances, the number of variant sequences is about 10 to 500, 25 to 475, 50 to 450, 75 to 425, 100 to 400, 125 to 375, 150 to 350, 175 to 325, 200 to 300, 225 to 375, 250 to 350, or 275 to 325 sequences.

[0108] Variant sequences for the at least one region of the antibody, in some instances, vary in length or sequence. In some instances, the at least one region that is de novo synthesized is for CDRH1, CDRH2, CDRH3, CDRL1, CDRL2, CDRL3, VL, VH, or combinations thereof. In some instances, the at least one region that is de novo synthesized is for framework element 1 (FW1), framework element 2 (FW2), framework element 3 (FW3), or framework element 4 (FW4). In some instances, the variant sequence comprises at least or about 1, 2, 3, 4, 5, 6, 7, 8, 9, 10, 15, 20, 25, 30, 35, 40, 45, 50, or more than 50 variant nucleotides or amino acids as compared to wild-type. In some instances, the variant sequence comprises at least or about 1, 2, 3, 4, 5, 6, 7, 8, 9, 10, 15, 20, 25, 30, 35, 40, 45, or 50 additional nucleotides or amino acids as compared to wild-type. In some instances, the variant sequence comprises at least or about 1, 2, 3, 4, 5, 6, 7, 8, 9, 10, 15, 20, 25, 30, 35, 40, 45, or 50 less nucleotides or amino acids as compared to wild-type. In some instances, the libraries comprise at least or about 10¹, 10², 10³, 10⁴, 10⁵, 10⁶, 10⁷, 10⁸, 10⁹, 10¹⁰, or more than 10¹⁰ variants.

[0109] Following synthesis of antibody libraries, antibody libraries may be used for screening and analysis. For example, antibody libraries are assayed for library displayability and panning. In some instances, displayability is assayed using a selectable tag. Exemplary tags include, but are not limited to, a radioactive label, a fluorescent label, an enzyme, a chemiluminescent tag, a colorimetric tag, an affinity tag or other labels or tags that are known in the art. In some instances, the tag is histidine, polyhistidine, myc, hemagglutinin (HA), or FLAG. In some instances, antibody libraries are assayed by sequencing using various methods including, but not limited to, single-molecule real-time (SMRT) sequencing, Polony sequencing, sequencing by ligation, reversible terminator sequencing, proton detection sequencing, ion semiconductor sequencing, nanopore sequencing, electronic sequencing, pyrosequencing, Maxam-Gilbert sequencing, chain termination (e.g., Sanger) sequencing, +S sequencing, or sequencing by synthesis. In some instances, antibody libraries are displayed on the surface of a cell or phage. In some instances, antibody libraries are enriched for sequences with a desired activity using phage display.

[0110] In some instances, the antibody libraries are assayed for functional activity, structural stability (e.g., thermal stable or pH stable), expression, specificity, or a combination thereof. In some instances, the antibody libraries are assayed for antibody capable of folding. In some instances, a region of the antibody is assayed for functional activity, structural stability, expression, specificity, folding, or a combination thereof. For example, a VH region or VL region is assayed for functional activity, structural stability, expression, specificity, folding, or a combination thereof.

[0111] In some instances, the affinity of antibodies or IgGs generated by methods as described herein is at least or about 1.5×, 2.0×, 5×, 10×, 20×, 30×, 40×, 50×, 60×, 70×, 80×, 90×, 100×, 200×, or more than 200×improved binding affinity as compared to a comparator antibody. In some instances, the affinity of antibodies or IgGs generated by methods as described herein is at least or about 1.5×, 2.0×, 5×, 10×, 20×, 30×, 40×, 50×, 60×, 70×, 80×, 90×, 100×, 200×, or more than 200×improved function as compared to a comparator antibody. In some instances, the comparator antibody is an antibody with similar structure, sequence, or antigen target.

[0112] Expression Systems

[0113] Provided herein are libraries comprising nucleic acids encoding for antibody comprising binding domains, wherein the libraries have improved specificity, stability, expression, folding, or downstream activity. In some instances, libraries described herein are used for screening and analysis.

[0114] Provided herein are libraries comprising nucleic acids encoding for antibody comprising binding domains, wherein the nucleic acid libraries are used for screening and analysis. In some instances, screening and analysis comprises in vitro, in vivo, or ex vivo assays. Cells for screening include primary cells taken from living subjects or cell lines. Cells may be from prokaryotes (e.g., bacteria and fungi) or eukaryotes (e.g., animals and plants). Exemplary animal cells include, without limitation, those from a mouse, rabbit, primate, and insect. In some instances, cells for screening include a cell line including, but not limited to, Chinese Hamster Ovary (CHO) cell line, human embryonic kidney (HEK) cell line, or baby hamster kidney (BHK) cell line. In some instances, nucleic acid libraries described herein may also be delivered to a multicellular organism. Exemplary multicellular organisms include, without limitation, a plant, a mouse, rabbit, primate, and insect.

[0115] Nucleic acid libraries described herein may be screened for various pharmacological or pharmacokinetic properties. In some instances, the libraries are screened using in vitro assays, in vivo assays, or ex vivo assays. For example, in vitro pharmacological or pharmacokinetic properties that are screened include, but are not limited to, binding affinity, binding specificity, and binding avidity. Exemplary in vivo pharmacological or pharmacokinetic properties of libraries described herein that are screened include, but are not limited to, therapeutic efficacy, activity, preclinical toxicity properties, clinical efficacy properties, clinical toxicity properties, immunogenicity, potency, and clinical safety properties.

[0116] Provided herein are nucleic acid libraries, wherein the nucleic acid libraries may be expressed in a vector. Expression vectors for inserting nucleic acid libraries disclosed herein may comprise eukaryotic or prokaryotic expression vectors. Exemplary expression vectors include, without limitation, mammalian expression vectors: pSF-CMV-NEO-NH2-PPT-3×FLAG, pSF-CMV-NEO—COOH-3×FLAG, pSF-CMV—PURO-NH2-GST-TEV, pSF-OXB20-COOH-TEV-FLAG(R)-6His, pCEP4 pDEST27, pSF-CMV-Ub-KrYFP, pSF-CMV-FMDV-daGFP, pEF1a-mCherry-N1 Vector, pEFla-tdTomato Vector, pSF-CMV-FMDV-Hygro, pSF-CMV-PGK-Puro, pMCP-tag(m), and pSF-CMV—PURO-NH2-CMYC; bacterial expression vectors: pSF-OXB20-BetaGal, pSF-OXB20-Fluc, pSF-OXB20, and pSF-Tac; plant expression vectors: pRI 101-AN DNA and pCambia2301; and yeast expression vectors: pTYB21 and pKLAC2, and insect vectors: pAc5.1/V5-His A and pDEST8. In some instances, the vector is pcDNA3 or pcDNA3.1.

[0117] Described herein are nucleic acid libraries that are expressed in a vector to generate a construct comprising an antibody. In some instances, a size of the construct varies. In some instances, the construct comprises at least or about 500, 600, 700, 800, 900, 1000, 1100, 1300, 1400, 1500, 1600, 1700, 1800, 2000, 2400, 2600, 2800, 3000, 3200, 3400, 3600, 3800, 4000, 4200, 4400, 4600, 4800, 5000, 6000, 7000, 8000, 9000, 10000, or more than 10000 bases. In some instances, a the construct comprises a range of about 300 to 1,000, 300 to 2,000, 300 to 3,000, 300 to 4,000, 300 to 5,000, 300 to 6,000, 300 to 7,000, 300 to 8,000, 300 to 9,000, 300 to 10,000, 1,000 to 2,000, 1,000 to 3,000, 1,000 to 4,000, 1,000 to 5,000, 1,000 to 6,000, 1,000 to 7,000, 1,000 to 8,000, 1,000 to 9,000, 1,000 to 10,000, 2,000 to 3,000, 2,000 to 4,000, 2,000 to 5,000, 2,000 to 6,000, 2,000 to 7,000, 2,000 to 8,000, 2,000 to 9,000, 2,000 to 10,000, 3,000 to 4,000, 3,000 to 5,000, 3,000 to 6,000, 3,000 to 7,000, 3,000 to 8,000, 3,000 to 9,000, 3,000 to 10,000, 4,000 to 5,000, 4,000 to 6,000, 4,000 to 7,000, 4,000 to 8,000, 4,000 to 9,000, 4,000 to 10,000, 5,000 to 6,000, 5,000 to 7,000, 5,000 to 8,000, 5,000 to 9,000, 5,000 to 10,000, 6,000 to 7,000, 6,000 to 8,000, 6,000 to 9,000, 6,000 to 10,000, 7,000 to 8,000, 7,000 to 9,000, 7,000 to 10,000, 8,000 to 9,000, 8,000 to 10,000, or 9,000 to 10,000 bases.

[0118] Provided herein are libraries comprising nucleic acids encoding for antibodies, wherein the nucleic acid libraries are expressed in a cell. In some instances, the libraries are synthesized to express a reporter gene. Exemplary reporter genes include, but are not limited to, acetohydroxyacid synthase (AHAS), alkaline phosphatase (AP), beta galactosidase (LacZ), beta glucuronidase (GUS), chloramphenicol acetyltransferase (CAT), green fluorescent protein (GFP), red fluorescent protein (RFP), yellow fluorescent protein (YFP), cyan fluorescent protein (CFP), cerulean fluorescent protein, citrine fluorescent protein, orange fluorescent protein, cherry fluorescent protein, turquoise fluorescent protein, blue fluorescent protein, horseradish peroxidase (HRP), luciferase (Luc), nopaline synthase (NOS), octopine synthase (OCS), luciferase, and derivatives thereof. Methods to determine modulation of a reporter gene are well known in the art, and include, but are not limited to, fluorometric methods (e.g. fluorescence spectroscopy, Fluorescence Activated Cell Sorting (FACS), fluorescence microscopy), and antibiotic resistance determination.

[0119] Diseases and Disorders

[0120] Provided herein are SARS-CoV-2 or ACE2 binding libraries comprising nucleic acids encoding for antibodies comprising SARS-CoV-2 or ACE2 binding domains may have therapeutic effects. In some instances, the SARS-CoV-2 or ACE2 binding libraries result in protein when translated that is used to treat a disease or disorder. In some instances, the protein is an immunoglobulin. In some instances, the protein is a peptidomimetic. In some instances, the disease or disorder is a viral infection caused by SARS-CoV-2. In some instances, the disease or disorder is a respiratory disease or disorder caused by SARS-CoV-2.

[0121] SARS-CoV-2 or ACE2 variant antibody libraries as described herein may be used to treat SARS-CoV-2. In some embodiments, the SARS-CoV-2 or ACE2 variant antibody libraries are used to treat or prevent symptoms of SARS-CoV-2. These symptoms include, but are not limited to, fever, chills, cough, fatigue, headaches, loss of taste, loss of smell, nausea, vomiting, muscle weakness, sleep difficulties, anxiety, and depression. In some embodiments, the SARS-CoV-2 or ACE2 variant antibody libraries are used to treat a subject who has symptoms for an extended period of time. In some embodiments, the subject has symptoms for an extended period of time after testing negative for SARS-CoV-2. In some embodiments, the subject has symptoms for an extended period of time including at least 1 week, 2 weeks, 3 weeks, 1 month, 2 months, 3 months, 4 months, 5 months, 6 months, 7 months, 8 months, 9 months, 10 months, 11 months, 1 year, or more than 1 year.

[0122] In some instances, the subject is a mammal. In some instances, the subject is a mouse, rabbit, dog, or human. Subjects treated by methods described herein may be infants, adults, or children. Pharmaceutical compositions comprising antibodies or antibody fragments as described herein may be administered intravenously or subcutaneously. In some instances, a pharmaceutical composition comprises an antibody or antibody fragment (e.g., multispecific antibody) comprising a sequence of any one as provided in Tables 13-17. In some instances, an antibody or antibody fragment described herein comprises a sequence that is at least 80% identical to a sequence of any one as provided in Tables 13-17. In some instances, an antibody or antibody fragment described herein comprises a sequence that is at least 85% identical to a sequence of any one as provided in Tables 13-17. In some instances, an antibody or antibody fragment described herein comprises a sequence that is at least 90% identical to a sequence of any one as provided in Tables 13-17. In some instances, an antibody or antibody fragment described herein comprises a sequence that is at least 95% identical to a sequence of any one as provided in Tables 13-17.

[0123] In some instances, a pharmaceutical composition comprises an antibody or antibody fragment (e.g., multispecific antibody) comprising a sequence of any one of SEQ ID NOs: 1-3193. In some instances, an antibody or antibody fragment described herein comprises a sequence that is at least 80% identical to a sequence of any one of SEQ ID NOs: 1-3193. In some instances, an antibody or antibody fragment described herein comprises a sequence that is at least 85% identical to a sequence of any one of SEQ ID NOs: 1-3193. In some instances, an antibody or antibody fragment described herein comprises a sequence that is at least 90% identical to a sequence of any one of SEQ ID NOs: 1-3193. In some instances, an antibody or antibody fragment described herein comprises a sequence that is at least 95% identical to a sequence of any one of SEQ ID NOs: 1-3193.

[0124] In some instances, a pharmaceutical composition comprises an antibody or antibody fragment (e.g., multispecific antibody) comprising a first CDRH1 sequence of any one of SEQ ID NOs: 1-122 and a second CDRH2 sequence of any one of SEQ ID NOs: 123-651. In some instances, an antibody or antibody fragment described herein comprises a sequence that is at least 80% identical to a first CDRH1 sequence of any one of SEQ ID NOs: 1-122 and a second CDRH2 sequence of any one of SEQ ID NOs: 123-651. In some instances, an antibody or antibody fragment described herein comprises a sequence that is at least 85% identical to a first CDRH1 sequence of any one of SEQ ID NOs: 1-122 and a second CDRH2 sequence of any one of SEQ ID NOs: 123-651. In some instances, an antibody or antibody fragment described herein comprises a sequence that is at least 90% identical to a first CDRH1 sequence of any one of SEQ ID NOs: 1-89 and a second CDRH2 sequence of any one of SEQ ID NOs: 123-651. In some instances, an antibody or antibody fragment described herein comprises a sequence that is at least 95% identical to a first CDRH1 sequence of any one of SEQ ID NOs: 1-122 and a second CDRH2 sequence of any one of SEQ ID NOs: 123-651. In some instances, an antibody or antibody fragment described herein comprises a first CDRH2 sequence of any one of SEQ ID NOs: 652-773 and a second CDRH2 sequence of any one of SEQ ID NOs: 774-1302. In some instances, an antibody or antibody fragment described herein comprises a sequence that is at least 80% identical to first CDRH2 sequence of any one of SEQ ID NOs: 652-773 and a second CDRH2 sequence of any one of SEQ ID NOs: 774-1302. In some instances, an antibody or antibody fragment described herein comprises a sequence that is at least 85% identical to first CDRH2 sequence of any one of SEQ ID NOs: 652-773 and a second CDRH2 sequence of any one of SEQ ID NOs: 774-1302. In some instances, an antibody or antibody fragment described herein comprises a sequence that is at least 90% identical to a first CDRH2 sequence of any one of SEQ ID NOs: 652-773 and a second CDRH2 sequence of any one of SEQ ID NOs: 774-1302. In some instances, an antibody or antibody fragment described herein comprises a sequence that is at least 95% identical to a first CDRH2 sequence of any one of SEQ ID NOs: 652-773 and a second CDRH2 sequence of any one of SEQ ID NOs: 774-1302. In some instances, an antibody or antibody fragment described herein comprises a first CDRH3 sequence of any one of SEQ ID NOs: 1303-1425 and a second CDRH3 sequence of any one of SEQ ID NOs: 1426-1953. In some instances, an antibody or antibody fragment described herein comprises a sequence that is at least 80% identical to a first CDRH3 sequence of any one of SEQ ID NOs: 1303-1425 and a second CDRH3 sequence of any one of SEQ ID NOs: 1426-1953. In some instances, an antibody or antibody fragment described herein comprises a sequence that is at least 85% identical to a first CDRH3 sequence of any one of SEQ ID NOs: 1303-1425 and a second CDRH3 sequence of any one of SEQ ID NOs: 1426-1953. In some instances, an antibody or antibody fragment described herein comprises a sequence that is at least 90% identical to a first CDRH3 sequence of any one of SEQ ID NOs: 1303-1425 and a second CDRH3 sequence of any one of SEQ ID NOs: 1426-1953. In some instances, an antibody or antibody fragment described herein comprises a sequence that is at least 95% identical a first CDRH3 sequence of any one of SEQ ID NOs: 1303-1425 and a second CDRH3 sequence of any one of SEQ ID NOs: 1426-1953.

[0125] In some instances, a pharmaceutical composition comprises an antibody or antibody fragment (e.g., multispecific antibody) comprising a first variable domain, heavy chain region (VH) comprising an amino acid sequence at least about 90% identical to a sequence as set forth in any one of SEQ ID NOs: 2212-2333, and a second VH comprising an amino acid sequence at least about 90% identical to a sequence as set forth in any one of SEQ ID NOs: 2334-3099. In some instances, the antibodies or antibody fragments comprise a first VH comprising at least or about 70%, 80%, 85%, 90%, 91%, 92%, 93%, 94%, 95%, 96%, 97%, 98%, 99%, or 100% sequence identity to any one of SEQ ID NOs: 2212-2333, and a second VH comprising at least or about 70%, 80%, 85%, 90%, 91%, 92%, 93%, 94%, 95%, 96%, 97%, 98%, 99%, or 100% sequence identity to any one of SEQ ID NOs: 2334-3099.

[0126] In some instances, a pharmaceutical composition comprises an antibody or antibody fragment (e.g., multispecific antibody) comprising an amino acid sequence at least about 90% identical to a sequence as set forth SEQ ID NO: 3192. In some instances, the antibodies or antibody fragments comprise an amino acid sequence at least or about 70%, 80%, 85%, 90%, 91%, 92%, 93%, 94%, 95%, 96%, 97%, 98%, 99%, or 100% sequence identity to SEQ ID NO: 3192.

[0127] In some instances, a pharmaceutical composition comprises an antibody or antibody fragment (e.g., multispecific antibody) comprising an amino acid sequence at least about 90% identical to a sequence as set forth SEQ ID NO: 3193. In some instances, the antibodies or antibody fragments comprise an amino acid sequence at least or about 70%, 80%, 85%, 90%, 91%, 92%, 93%, 94%, 95%, 96%, 97%, 98%, 99%, or 100% sequence identity to SEQ ID NO: 3193.

[0128] SARS-CoV-2 or ACE2 antibodies as described herein may confer immunity after exposure to SARS-CoV-2 or ACE2 antibodies. In some embodiments, the SARS-CoV-2 or ACE2 antibodies described herein are used for passive immunization of a subject. In some instances, the subject is actively immunized after exposure to SARS-CoV-2 or ACE2 antibodies followed by exposure to SARS-CoV-2. In some embodiments, SARS-CoV-2 or ACE2 antibodies are derived from a subject who has recovered from SARS-CoV-2.

[0129] In some embodiments, the immunity occurs at least about 30 minutes, 1 hour, 5 hours, 10 hours, 16 hours, 20 hours, 24 hours, 2 days, 3 days, 4 days, 5 days, 6 days, 1 week, 2 weeks, or more than 2 weeks after exposure to SARS-CoV-2 or ACE2 antibodies. In some instances, the immunity lasts for at least about 1 day, 2 days, 3 days, 4 days, 5 days, 6 days, 1 week, 2 weeks, 3 weeks, 1 month, 2 months, 3 months, 4 months, 5 months, 6 months, 7 months, 8 months, 9 months, 10 months, 11 months, 1 year, 2 years, 3 years, 4 years, 5 years, or more than 5 years after exposure to SARS-CoV-2 or ACE2 antibodies.

[0130] In some embodiments, the subject receives the SARS-CoV-2 or ACE2 antibodies prior to exposure to SARS-CoV-2. In some embodiments, the subject receives the SARS-CoV-2 or ACE2 antibodies at least about 30 minutes, 1 hour, 4 hours, 8 hours, 12 hours, 16 hours, 20 hours, 1 day, 2 days, 3 days, 4 days, 5 days, 6 days, 1 week, 2 weeks, 3 weeks, 1 month, 2 months, 3 months, 4 months, 5 months, 6 months, 7 months, 8 months, 9 months, 10 months, 11 months, 1 year, 2 years, 3 years, 4 years, 5 years, or more than 5 years prior to exposure to SARS-CoV-2. In some embodiments, the subject receives the SARS-CoV-2 or ACE2 antibodies after exposure to SARS-CoV-2. In some embodiments, the subject receives the SARS-CoV-2 or ACE2 antibodies at least about 30 minutes, 1 hour, 4 hours, 8 hours, 12 hours, 16 hours, 20 hours, 1 day, 2 days, 3 days, 4 days, 5 days, 6 days, 1 week, 2 weeks, 3 weeks, 1 month, 2 months, 3 months, 4 months, 5 months, 6 months, 7 months, 8 months, 9 months, 10 months, 11 months, 1 year, 2 years, 3 years, 4 years, 5 years, or more than 5 years after exposure to SARS-CoV-2.

[0131] SARS-CoV-2 or ACE2 antibodies described herein may be administered through various routes. The administration may, depending on the composition being administered, for example, be oral, pulmonary, intravenous, intraperitoneal, intramuscular, intracavity, subcutaneous, or transdermal.

[0132] Described herein are compositions or pharmaceutical compositions comprising SARS-CoV-2 or ACE2 antibodies or antibody fragment thereof that comprise various dosages of the antibodies or antibody fragment. In some instances, the dosage is ranging from about 1 to 25 mg/kg, from about 1 to 50 mg/kg, from about 1 to 80 mg/kg, from about 1 to about 100 mg/kg, from about 5 to about 100 mg/kg, from about 5 to about 80 mg/kg, from about 5 to about 60 mg/kg, from about 5 to about 50 mg/kg or from about 5 to about 500 mg/kg which can be administered in single or multiple doses. In some instances, the dosage is administered in an amount of about 0.01 mg/kg, about 0.05 mg/kg, about 0.10 mg/kg, about 0.25 mg/kg, about 0.5 mg/kg, about 1 mg/kg, about 5 mg/kg, about 10 mg/kg, about 15 mg/kg, about 20 mg/kg, about 25 mg/kg, about 30 mg/kg, about 35 mg/kg, about 40 mg/kg, about 45 mg/kg, about 50 mg/kg, about 55 mg/kg, about 60 mg/kg, about 65 mg/kg, about 70 mg/kg, about 75 mg/kg, about 80 mg/kg, about 85 mg/kg, about 90 mg/kg, about 95 mg/kg, about 100 mg/kg, about 105 mg/kg, about 110 mg/kg, about 115 mg/kg, about 120, about 125, about 130, about 135, about 140, about 145, about 150, about 155, about 160, about 165, about 170, about 175, about 180, about 185, about 190, about 195, about 200, about 205, about 210, about 215, about 220, about 225, about 230, about 240, about 250, about 260, about 270, about 275, about 280, about 290, about 300, about 310, about 320, about 330, about 340, about 350, about 360 mg/kg, about 370 mg/kg, about 380 mg/kg, about 390 mg/kg, about 400 mg/kg, 410 mg/kg, about 420 mg/kg, about 430 mg/kg, about 440 mg/kg, about 450 mg/kg, about 460 mg/kg, about 470 mg/kg, about 480 mg/kg, about 490 mg/kg, or about 500 mg/kg.

[0133] SARS-CoV-2 or ACE2 antibodies or antibody fragment thereof described herein, in some embodiments, improve disease severity. In some embodiments, the SARS-CoV-2 or ACE2 antibodies or antibody fragment thereof improve disease severity at a dose level of about 0.01 mg/kg, about 0.05 mg/kg, about 0.10 mg/kg, about 0.25 mg/kg, about 0.5 mg/kg, about 1 mg/kg, about 5 mg/kg, about 10 mg/kg, about 15 mg/kg, or about 20 mg/kg. In some embodiments, the SARS-CoV-2 or ACE2 antibodies or antibody fragment thereof improve disease severity at a dose level of about 1 mg/kg, about 5 mg/kg, or about 10 mg/kg. In some embodiments, disease severity is determined by percent weight loss. In some embodiments, the SARS-CoV-2 or ACE2 antibodies or antibody fragment thereof protects against weight loss at a dose level of about 0.01 mg/kg, about 0.05 mg/kg, about 0.10 mg/kg, about 0.25 mg/kg, about 0.5 mg/kg, about 1 mg/kg, about 5 mg/kg, about 10 mg/kg, about 15 mg/kg, or about 20 mg/kg. In some embodiments, the SARS-CoV-2 or ACE2 antibodies or antibody fragment thereof protects against weight loss at a dose level of about 1 mg/kg, about 5 mg/kg, or about 10 mg/kg. In some embodiments, SARS-CoV-2 or ACE2 antibodies or antibody fragment thereof

[0134] Variant Libraries

[0135] Codon Variation

[0136] Variant nucleic acid libraries described herein may comprise a plurality of nucleic acids, wherein each nucleic acid encodes for a variant codon sequence compared to a reference nucleic acid sequence. In some instances, each nucleic acid of a first nucleic acid population contains a variant at a single variant site. In some instances, the first nucleic acid population contains a plurality of variants at a single variant site such that the first nucleic acid population contains more than one variant at the same variant site. The first nucleic acid population may comprise nucleic acids collectively encoding multiple codon variants at the same variant site. The first nucleic acid population may comprise nucleic acids collectively encoding up to 19 or more codons at the same position. The first nucleic acid population may comprise nucleic acids collectively encoding up to 60 variant triplets at the same position, or the first nucleic acid population may comprise nucleic acids collectively encoding up to 61 different triplets of codons at the same position. Each variant may encode for a codon that results in a different amino acid during translation. Table 1 provides a listing of each codon possible (and the representative amino acid) for a variant site.

TABLE 1
List of codons and amino acids

| | One | Three | | | | | | |
|---|---|---|---|---|---|---|---|---|
| | letter | letter | | | | | | |
| Amino Acids | code | code | Codons | | | | | |
| Alanine | A | Ala | GCA | GCC | GCG | GCT | | |
| Cysteine | C | Cys | TGC | TGT | | | | |
| Aspartic acid | D | Asp | GAC | GAT | | | | |
| Glutamic | E | Glu | GAA | GAG | | | | |
| acid | | | | | | | | |
| Phenyl- | F | Phe | TTC | TTT | | | | |
| alanine | | | | | | | | |
| Glycine | G | Gly | GGA | GGC | GGG | GGT | | |
| Histidine | H | His | CAC | CAT | | | | |
| Isoleucine | I | Iso | ATA | ATC | ATT | | | |
| Lysine | K | Lys | AAA | AAG | | | | |
| Leucine | L | Leu | TTA | TTG | CTA | CTC | CTG | CTT |
| Methionine | M | Met | ATG | | | | | |
| Asparagine | N | Asn | AAC | AAT | | | | |
| Proline | P | Pro | CCA | CCC | CCG | CCT | | |
| Glutamine | Q | Gln | CAA | CAG | | | | |
| Arginine | R | Arg | AGA | AGG | CGA | CGC | CGG | CGT |
| Serine | S | Ser | AGC | AGT | TCA | TCC | TCG | TCT |

| | | | | | | |
|---|---|---|---|---|---|---|
| Threonine | T | Thr | ACA | ACC | ACG | ACT |
| Valine | V | Val | GTA | GTC | GTG | GTT |

| Tryptophan | W | Trp | TGG | |
|---|---|---|---|---|
| Tyrosine | Y | Tyr | TAC | TAT |

[0137] A nucleic acid population may comprise varied nucleic acids collectively encoding up to 20 codon variations at multiple positions. In such cases, each nucleic acid in the population comprises variation for codons at more than one position in the same nucleic acid. In some instances, each nucleic acid in the population comprises variation for codons at 1, 2, 3, 4, 5, 6, 7, 8, 9, 10, 11, 12, 13, 14, 15, 16, 17, 18, 19, 20 or more codons in a single nucleic acid. In some instances, each variant long nucleic acid comprises variation for codons at 1, 2, 3, 4, 5, 6, 7, 8, 9, 10, 11, 12, 13, 14, 15, 16, 17, 18, 19, 20, 21, 22, 23, 24, 25, 26, 27, 28, 29, 30 or more codons in a single long nucleic acid. In some instances, the variant nucleic acid population comprises variation for codons at 1, 2, 3, 4, 5, 6, 7, 8, 9, 10, 11, 12, 13, 14, 15, 16, 17, 18, 19, 20, 21, 22, 23, 24, 25, 26, 27, 28, 29, 30 or more codons in a single nucleic acid. In some instances, the variant nucleic acid population comprises variation for codons in at least about 10, 20, 30, 40, 50, 60, 70, 80, 90, 100 or more codons in a single long nucleic acid.

[0138] Highly Parallel Nucleic Acid Synthesis

[0139] Provided herein is a platform approach utilizing miniaturization, parallelization, and vertical integration of the end-to-end process from polynucleotide synthesis to gene assembly within nanowells on silicon to create a revolutionary synthesis platform. Devices described herein provide, with the same footprint as a 96-well plate, a silicon synthesis platform is capable of increasing throughput by a factor of up to 1,000 or more compared to traditional synthesis methods, with production of up to approximately 1,000,000 or more polynucleotides, or 10,000 or more genes in a single highly-parallelized run.

[0140] With the advent of next-generation sequencing, high resolution genomic data has become an important factor for studies that delve into the biological roles of various genes in both normal biology and disease pathogenesis. At the core of this research is the central dogma of molecular biology and the concept of “residue-by-residue transfer of sequential information.” Genomic information encoded in the DNA is transcribed into a message that is then translated into the protein that is the active product within a given biological pathway.

[0141] Another exciting area of study is on the discovery, development and manufacturing of therapeutic molecules focused on a highly-specific cellular target. High diversity DNA sequence libraries are at the core of development pipelines for targeted therapeutics. Gene variants are used to express proteins in a design, build, and test protein engineering cycle that ideally culminates in an optimized gene for high expression of a protein with high affinity for its therapeutic target. As an example, consider the binding pocket of a receptor. The ability to test all sequence permutations of all residues within the binding pocket simultaneously will allow for a thorough exploration, increasing chances of success. Saturation mutagenesis, in which a researcher attempts to generate all possible mutations or variants at a specific site within the receptor, represents one approach to this development challenge. Though costly and time and labor-intensive, it enables each variant to be introduced into each position. In contrast, combinatorial mutagenesis, where a few selected positions or short stretch of DNA may be modified extensively, generates an incomplete repertoire of variants with biased representation.

[0142] To accelerate the drug development pipeline, a library with the desired variants available at the intended frequency in the right position available for testing—in other words, a precision library, enables reduced costs as well as turnaround time for screening. Provided herein are methods for synthesizing nucleic acid synthetic variant libraries which provide for precise introduction of each intended variant at the desired frequency. To the end user, this translates to the ability to not only thoroughly sample sequence space but also be able to query these hypotheses in an efficient manner, reducing cost and screening time. Genome-wide editing can elucidate important pathways, libraries where each variant and sequence permutation can be tested for optimal functionality, and thousands of genes can be used to reconstruct entire pathways and genomes to re-engineer biological systems for drug discovery.

[0143] In a first example, a drug itself can be optimized using methods described herein. For example, to improve a specified function of an antibody, a variant polynucleotide library encoding for a portion of the antibody is designed and synthesized. A variant nucleic acid library for the antibody can then be generated by processes described herein (e.g., PCR mutagenesis followed by insertion into a vector). The antibody is then expressed in a production cell line and screened for enhanced activity. Example screens include examining modulation in binding affinity to an antigen, stability, or effector function (e.g., ADCC, complement, or apoptosis). Exemplary regions to optimize the antibody include, without limitation, the Fc region, Fab region, variable region of the Fab region, constant region of the Fab region, variable domain of the heavy chain or light chain (V_{H} or V_{L}), and specific complementarity-determining regions (CDRs) of V_{H} or V_{L}.

[0144] Nucleic acid libraries synthesized by methods described herein may be expressed in various cells associated with a disease state. Cells associated with a disease state include cell lines, tissue samples, primary cells from a subject, cultured cells expanded from a subject, or cells in a model system. Exemplary model systems include, without limitation, plant and animal models of a disease state.

[0145] To identify a variant molecule associated with prevention, reduction or treatment of a disease state, a variant nucleic acid library described herein is expressed in a cell associated with a disease state, or one in which a cell a disease state can be induced. In some instances, an agent is used to induce a disease state in cells. Exemplary tools for disease state induction include, without limitation, a Cre/Lox recombination system, LPS inflammation induction, and streptozotocin to induce hypoglycemia. The cells associated with a disease state may be cells from a model system or cultured cells, as well as cells from a subject having a particular disease condition. Exemplary disease conditions include a bacterial, fungal, viral, autoimmune, or proliferative disorder (e.g., cancer). In some instances, the variant nucleic acid library is expressed in the model system, cell line, or primary cells derived from a subject, and screened for changes in at least one cellular activity. Exemplary cellular activities include, without limitation, proliferation, cycle progression, cell death, adhesion, migration, reproduction, cell signaling, energy production, oxygen utilization, metabolic activity, and aging, response to free radical damage, or any combination thereof

[0146] Substrates

[0147] Devices used as a surface for polynucleotide synthesis may be in the form of substrates which include, without limitation, homogenous array surfaces, patterned array surfaces, channels, beads, gels, and the like. Provided herein are substrates comprising a plurality of clusters, wherein each cluster comprises a plurality of loci that support the attachment and synthesis of polynucleotides. In some instances, substrates comprise a homogenous array surface. For example, the homogenous array surface is a homogenous plate. The term “locus” as used herein refers to a discrete region on a structure which provides support for polynucleotides encoding for a single predetermined sequence to extend from the surface. In some instances, a locus is on a two dimensional surface, e.g., a substantially planar surface. In some instances, a locus is on a three-dimensional surface, e.g., a well, microwell, channel, or post. In some instances, a surface of a locus comprises a material that is actively functionalized to attach to at least one nucleotide for polynucleotide synthesis, or preferably, a population of identical nucleotides for synthesis of a population of polynucleotides. In some instances, polynucleotide refers to a population of polynucleotides encoding for the same nucleic acid sequence. In some cases, a surface of a substrate is inclusive of one or a plurality of surfaces of a substrate. The average error rates for polynucleotides synthesized within a library described here using the systems and methods provided are often less than 1 in 1000, less than about 1 in 2000, less than about 1 in 3000 or less often without error correction.

[0148] Provided herein are surfaces that support the parallel synthesis of a plurality of polynucleotides having different predetermined sequences at addressable locations on a common support. In some instances, a substrate provides support for the synthesis of more than 50, 100, 200, 400, 600, 800, 1000, 1200, 1400, 1600, 1800, 2,000; 5,000; 10,000; 20,000; 50,000; 100,000; 200,000; 300,000; 400,000; 500,000; 600,000; 700,000; 800,000; 900,000; 1,000,000; 1,200,000; 1,400,000; 1,600,000; 1,800,000; 2,000,000; 2,500,000; 3,000,000; 3,500,000; 4,000,000; 4,500,000; 5,000,000; 10,000,000 or more non-identical polynucleotides. In some cases, the surfaces provide support for the synthesis of more than 50, 100, 200, 400, 600, 800, 1000, 1200, 1400, 1600, 1800, 2,000; 5,000; 10,000; 20,000; 50,000; 100,000; 200,000; 300,000; 400,000; 500,000; 600,000; 700,000; 800,000; 900,000; 1,000,000; 1,200,000; 1,400,000; 1,600,000; 1,800,000; 2,000,000; 2,500,000; 3,000,000; 3,500,000; 4,000,000; 4,500,000; 5,000,000; 10,000,000 or more polynucleotides encoding for distinct sequences. In some instances, at least a portion of the polynucleotides have an identical sequence or are configured to be synthesized with an identical sequence. In some instances, the substrate provides a surface environment for the growth of polynucleotides having at least 80, 90, 100, 120, 150, 175, 200, 225, 250, 275, 300, 325, 350, 375, 400, 425, 450, 475, 500 bases or more.

[0149] Provided herein are methods for polynucleotide synthesis on distinct loci of a substrate, wherein each locus supports the synthesis of a population of polynucleotides. In some cases, each locus supports the synthesis of a population of polynucleotides having a different sequence than a population of polynucleotides grown on another locus. In some instances, each polynucleotide sequence is synthesized with 1, 2, 3, 4, 5, 6, 7, 8, 9 or more redundancy across different loci within the same cluster of loci on a surface for polynucleotide synthesis. In some instances, the loci of a substrate are located within a plurality of clusters. In some instances, a substrate comprises at least 10, 500, 1000, 2000, 3000, 4000, 5000, 6000, 7000, 8000, 9000, 10000, 11000, 12000, 13000, 14000, 15000, 20000, 30000, 40000, 50000 or more clusters. In some instances, a substrate comprises more than 2,000; 5,000; 10,000; 100,000; 200,000; 300,000; 400,000; 500,000; 600,000; 700,000; 800,000; 900,000; 1,000,000; 1,100,000; 1,200,000; 1,300,000; 1,400,000; 1,500,000; 1,600,000; 1,700,000; 1,800,000; 1,900,000; 2,000,000; 300,000; 400,000; 500,000; 600,000; 700,000; 800,000; 900,000; 1,000,000; 1,200,000; 1,400,000; 1,600,000; 1,800,000; 2,000,000; 2,500,000; 3,000,000; 3,500,000; 4,000,000; 4,500,000; 5,000,000; or 10,000,000 or more distinct loci. In some instances, a substrate comprises about 10,000 distinct loci. The amount of loci within a single cluster is varied in different instances. In some cases, each cluster includes 1, 2, 3, 4, 5, 6, 7, 8, 9, 10, 20, 30, 40, 50, 60, 70, 80, 90, 100, 120, 130, 150, 200, 300, 400, 500 or more loci. In some instances, each cluster includes about 50-500 loci. In some instances, each cluster includes about 100-200 loci. In some instances, each cluster includes about 100-150 loci. In some instances, each cluster includes about 109, 121, 130 or 137 loci. In some instances, each cluster includes about 19, 20, 61, 64 or more loci. Alternatively or in combination, polynucleotide synthesis occurs on a homogenous array surface.

[0150] In some instances, the number of distinct polynucleotides synthesized on a substrate is dependent on the number of distinct loci available in the substrate. In some instances, the density of loci within a cluster or surface of a substrate is at least or about 1, 10, 25, 50, 65, 75, 100, 130, 150, 175, 200, 300, 400, 500, 1,000 or more loci per mm². In some cases, a substrate comprises 10-500, 25-400, 50-500, 100-500, 150-500, 10-250, 50-250, 10-200, or 50-200 mm². In some instances, the distance between the centers of two adjacent loci within a cluster or surface is from about 10-500, from about 10-200, or from about 10-100 um. In some instances, the distance between two centers of adjacent loci is greater than about 10, 20, 30, 40, 50, 60, 70, 80, 90 or 100 um. In some instances, the distance between the centers of two adjacent loci is less than about 200, 150, 100, 80, 70, 60, 50, 40, 30, 20 or 10 um. In some instances, each locus has a width of about 0.5, 1, 2, 3, 4, 5, 6, 7, 8, 9, 10, 20, 30, 40, 50, 60, 70, 80, 90 or 100 um. In some cases, each locus has a width of about 0.5-100, 0.5-50, 10-75, or 0.5-50 um.

[0151] In some instances, the density of clusters within a substrate is at least or about 1 cluster per 100 mm², 1 cluster per 10 mm², 1 cluster per 5 mm², 1 cluster per 4 mm², 1 cluster per 3 mm², 1 cluster per 2 mm², 1 cluster per 1 mm², 2 clusters per 1 mm², 3 clusters per 1 mm², 4 clusters per 1 mm², 5 clusters per 1 mm², 10 clusters per 1 mm², 50 clusters per 1 mm² or more. In some instances, a substrate comprises from about 1 cluster per 10 mm² to about 10 clusters per 1 mm². In some instances, the distance between the centers of two adjacent clusters is at least or about 50, 100, 200, 500, 1000, 2000, or 5000 um. In some cases, the distance between the centers of two adjacent clusters is between about 50-100, 50-200, 50-300, 50-500, and 100-2000 um. In some cases, the distance between the centers of two adjacent clusters is between about 0.05-50, 0.05-10, 0.05-5, 0.05-4, 0.05-3, 0.05-2, 0.1-10, 0.2-10, 0.3-10, 0.4-10, 0.5-10, 0.5-5, or 0.5-2 mm. In some cases, each cluster has a cross section of about 0.5 to about 2, about 0.5 to about 1, or about 1 to about 2 mm. In some cases, each cluster has a cross section of about 0.5, 0.6, 0.7, 0.8, 0.9, 1, 1.1, 1.2, 1.3, 1.4, 1.5, 1.6, 1.7, 1.8, 1.9 or 2 mm. In some cases, each cluster has an interior cross section of about 0.5, 0.6, 0.7, 0.8, 0.9, 1, 1.1, 1.15, 1.2, 1.3, 1.4, 1.5, 1.6, 1.7, 1.8, 1.9 or 2 mm.

[0152] In some instances, a substrate is about the size of a standard 96 well plate, for example between about 100 and about 200 mm by between about 50 and about 150 mm. In some instances, a substrate has a diameter less than or equal to about 1000, 500, 450, 400, 300, 250, 200, 150, 100 or 50 mm. In some instances, the diameter of a substrate is between about 25-1000, 25-800, 25-600, 25-500, 25-400, 25-300, or 25-200 mm. In some instances, a substrate has a planar surface area of at least about 100; 200; 500; 1,000; 2,000; 5,000; 10,000; 12,000; 15,000; 20,000; 30,000; 40,000; 50,000 mm² or more. In some instances, the thickness of a substrate is between about 50-2000, 50-1000, 100-1000, 200-1000, or 250-1000 mm.

[0153] Surface Materials

[0154] Substrates, devices, and reactors provided herein are fabricated from any variety of materials suitable for the methods, compositions, and systems described herein. In certain instances, substrate materials are fabricated to exhibit a low level of nucleotide binding. In some instances, substrate materials are modified to generate distinct surfaces that exhibit a high level of nucleotide binding. In some instances, substrate materials are transparent to visible and/or UV light. In some instances, substrate materials are sufficiently conductive, e.g., are able to form uniform electric fields across all or a portion of a substrate. In some instances, conductive materials are connected to an electric ground. In some instances, the substrate is heat conductive or insulated. In some instances, the materials are chemical resistant and heat resistant to support chemical or biochemical reactions, for example polynucleotide synthesis reaction processes. In some instances, a substrate comprises flexible materials. For flexible materials, materials can include, without limitation: nylon, both modified and unmodified, nitrocellulose, polypropylene, and the like. In some instances, a substrate comprises rigid materials. For rigid materials, materials can include, without limitation: glass; fuse silica; silicon, plastics (for example polytetrafluoroethylene, polypropylene, polystyrene, polycarbonate, and blends thereof, and the like); metals (for example, gold, platinum, and the like). The substrate, solid support or reactors can be fabricated from a material selected from the group consisting of silicon, polystyrene, agarose, dextran, cellulosic polymers, polyacrylamides, polydimethylsiloxane (PDMS), and glass. The substrates/solid supports or the microstructures, reactors therein may be manufactured with a combination of materials listed herein or any other suitable material known in the art.

[0155] Surface Architecture

[0156] Provided herein are substrates for the methods, compositions, and systems described herein, wherein the substrates have a surface architecture suitable for the methods, compositions, and systems described herein. In some instances, a substrate comprises raised and/or lowered features. One benefit of having such features is an increase in surface area to support polynucleotide synthesis. In some instances, a substrate having raised and/or lowered features is referred to as a three-dimensional substrate. In some cases, a three-dimensional substrate comprises one or more channels. In some cases, one or more loci comprise a channel. In some cases, the channels are accessible to reagent deposition via a deposition device such as a material deposition device. In some cases, reagents and/or fluids collect in a larger well in fluid communication one or more channels. For example, a substrate comprises a plurality of channels corresponding to a plurality of loci with a cluster, and the plurality of channels are in fluid communication with one well of the cluster. In some methods, a library of polynucleotides is synthesized in a plurality of loci of a cluster.

[0157] Provided herein are substrates for the methods, compositions, and systems described herein, wherein the substrates are configured for polynucleotide synthesis. In some instances, the structure is configured to allow for controlled flow and mass transfer paths for polynucleotide synthesis on a surface. In some instances, the configuration of a substrate allows for the controlled and even distribution of mass transfer paths, chemical exposure times, and/or wash efficacy during polynucleotide synthesis. In some instances, the configuration of a substrate allows for increased sweep efficiency, for example by providing sufficient volume for a growing polynucleotide such that the excluded volume by the growing polynucleotide does not take up more than 50, 45, 40, 35, 30, 25, 20, 15, 14, 13, 12, 11, 10, 9, 8, 7, 6, 5, 4, 3, 2, 1%, or less of the initially available volume that is available or suitable for growing the polynucleotide. In some instances, a three-dimensional structure allows for managed flow of fluid to allow for the rapid exchange of chemical exposure.

[0158] Provided herein are substrates for the methods, compositions, and systems described herein, wherein the substrates comprise structures suitable for the methods, compositions, and systems described herein. In some instances, segregation is achieved by physical structure. In some instances, segregation is achieved by differential functionalization of the surface generating active and passive regions for polynucleotide synthesis. In some instances, differential functionalization is achieved by alternating the hydrophobicity across the substrate surface, thereby creating water contact angle effects that cause beading or wetting of the deposited reagents. Employing larger structures can decrease splashing and cross-contamination of distinct polynucleotide synthesis locations with reagents of the neighboring spots. In some cases, a device, such as a material deposition device, is used to deposit reagents to distinct polynucleotide synthesis locations. Substrates having three-dimensional features are configured in a manner that allows for the synthesis of a large number of polynucleotides (e.g., more than about 10,000) with a low error rate (e.g., less than about 1:500, 1:1000, 1:1500, 1:2,000, 1:3,000, 1:5,000, or 1:10,000). In some cases, a substrate comprises features with a density of about or greater than about 1, 5, 10, 20, 30, 40, 50, 60, 70, 80, 100, 110, 120, 130, 140, 150, 160, 170, 180, 190, 200, 300, 400 or 500 features per mm².

[0159] A well of a substrate may have the same or different width, height, and/or volume as another well of the substrate. A channel of a substrate may have the same or different width, height, and/or volume as another channel of the substrate. In some instances, the diameter of a cluster or the diameter of a well comprising a cluster, or both, is between about 0.05-50, 0.05-10, 0.05-5, 0.05-4, 0.05-3, 0.05-2, 0.05-1, 0.05-0.5, 0.05-0.1, 0.1-10, 0.2-10, 0.3-10, 0.4-10, 0.5-10, 0.5-5, or 0.5-2 mm. In some instances, the diameter of a cluster or well or both is less than or about 5, 4, 3, 2, 1, 0.5, 0.1, 0.09, 0.08, 0.07, 0.06, or 0.05 mm. In some instances, the diameter of a cluster or well or both is between about 1.0 and 1.3 mm. In some instances, the diameter of a cluster or well, or both is about 1.150 mm. In some instances, the diameter of a cluster or well, or both is about 0.08 mm. The diameter of a cluster refers to clusters within a two-dimensional or three-dimensional substrate.

[0160] In some instances, the height of a well is from about 20-1000, 50-1000, 100-1000, 200-1000, 300-1000, 400-1000, or 500-1000 um. In some cases, the height of a well is less than about 1000, 900, 800, 700, or 600 um.

[0161] In some instances, a substrate comprises a plurality of channels corresponding to a plurality of loci within a cluster, wherein the height or depth of a channel is 5-500, 5-400, 5-300, 5-200, 5-100, 5-50, or 10-50 um. In some cases, the height of a channel is less than 100, 80, 60, 40, or 20 um.

[0162] In some instances, the diameter of a channel, locus (e.g., in a substantially planar substrate) or both channel and locus (e.g., in a three-dimensional substrate wherein a locus corresponds to a channel) is from about 1-1000, 1-500, 1-200, 1-100, 5-100, or 10-100 um, for example, about 90, 80, 70, 60, 50, 40, 30, 20 or 10 um. In some instances, the diameter of a channel, locus, or both channel and locus is less than about 100, 90, 80, 70, 60, 50, 40, 30, 20 or 10 um. In some instances, the distance between the center of two adjacent channels, loci, or channels and loci is from about 1-500, 1-200, 1-100, 5-200, 5-100, 5-50, or 5-30, for example, about 20 um.

[0163] Surface Modifications

[0164] Provided herein are methods for polynucleotide synthesis on a surface, wherein the surface comprises various surface modifications. In some instances, the surface modifications are employed for the chemical and/or physical alteration of a surface by an additive or subtractive process to change one or more chemical and/or physical properties of a substrate surface or a selected site or region of a substrate surface. For example, surface modifications include, without limitation, (1) changing the wetting properties of a surface, (2) functionalizing a surface, i.e., providing, modifying or substituting surface functional groups, (3) defunctionalizing a surface, i.e., removing surface functional groups, (4) otherwise altering the chemical composition of a surface, e.g., through etching, (5) increasing or decreasing surface roughness, (6) providing a coating on a surface, e.g., a coating that exhibits wetting properties that are different from the wetting properties of the surface, and/or (7) depositing particulates on a surface.

[0165] In some cases, the addition of a chemical layer on top of a surface (referred to as adhesion promoter) facilitates structured patterning of loci on a surface of a substrate. Exemplary surfaces for application of adhesion promotion include, without limitation, glass, silicon, silicon dioxide and silicon nitride. In some cases, the adhesion promoter is a chemical with a high surface energy. In some instances, a second chemical layer is deposited on a surface of a substrate. In some cases, the second chemical layer has a low surface energy. In some cases, surface energy of a chemical layer coated on a surface supports localization of droplets on the surface. Depending on the patterning arrangement selected, the proximity of loci and/or area of fluid contact at the loci are alterable.

[0166] In some instances, a substrate surface, or resolved loci, onto which nucleic acids or other moieties are deposited, e.g., for polynucleotide synthesis, are smooth or substantially planar (e.g., two-dimensional) or have irregularities, such as raised or lowered features (e.g., three-dimensional features). In some instances, a substrate surface is modified with one or more different layers of compounds. Such modification layers of interest include, without limitation, inorganic and organic layers such as metals, metal oxides, polymers, small organic molecules and the like.

[0167] In some instances, resolved loci of a substrate are functionalized with one or more moieties that increase and/or decrease surface energy. In some cases, a moiety is chemically inert. In some cases, a moiety is configured to support a desired chemical reaction, for example, one or more processes in a polynucleotide synthesis reaction. The surface energy, or hydrophobicity, of a surface is a factor for determining the affinity of a nucleotide to attach onto the surface. In some instances, a method for substrate functionalization comprises: (a) providing a substrate having a surface that comprises silicon dioxide; and (b) silanizing the surface using, a suitable silanizing agent described herein or otherwise known in the art, for example, an organofunctional alkoxysilane molecule. Methods and functionalizing agents are described in U.S. Pat. No. 5,474,796, which is herein incorporated by reference in its entirety.

[0168] In some instances, a substrate surface is functionalized by contact with a derivatizing composition that contains a mixture of silanes, under reaction conditions effective to couple the silanes to the substrate surface, typically via reactive hydrophilic moieties present on the substrate surface. Silanization generally covers a surface through self-assembly with organofunctional alkoxysilane molecules. A variety of siloxane functionalizing reagents can further be used as currently known in the art, e.g., for lowering or increasing surface energy. The organofunctional alkoxysilanes are classified according to their organic functions.

[0169] Polynucleotide Synthesis

[0170] Methods of the current disclosure for polynucleotide synthesis may include processes involving phosphoramidite chemistry. In some instances, polynucleotide synthesis comprises coupling a base with phosphoramidite. Polynucleotide synthesis may comprise coupling a base by deposition of phosphoramidite under coupling conditions, wherein the same base is optionally deposited with phosphoramidite more than once, i.e., double coupling. Polynucleotide synthesis may comprise capping of unreacted sites. In some instances, capping is optional. Polynucleotide synthesis may also comprise oxidation or an oxidation step or oxidation steps. Polynucleotide synthesis may comprise deblocking, detritylation, and sulfurization. In some instances, polynucleotide synthesis comprises either oxidation or sulfurization. In some instances, between one or each step during a polynucleotide synthesis reaction, the device is washed, for example, using tetrazole or acetonitrile. Time frames for any one step in a phosphoramidite synthesis method may be less than about 2 min, 1 min, 50 sec, 40 sec, 30 sec, 20 sec and 10 sec.

[0171] Polynucleotide synthesis using a phosphoramidite method may comprise a subsequent addition of a phosphoramidite building block (e.g., nucleoside phosphoramidite) to a growing polynucleotide chain for the formation of a phosphite triester linkage. Phosphoramidite polynucleotide synthesis proceeds in the 3′ to 5′ direction. Phosphoramidite polynucleotide synthesis allows for the controlled addition of one nucleotide to a growing nucleic acid chain per synthesis cycle. In some instances, each synthesis cycle comprises a coupling step. Phosphoramidite coupling involves the formation of a phosphite triester linkage between an activated nucleoside phosphoramidite and a nucleoside bound to the substrate, for example, via a linker. In some instances, the nucleoside phosphoramidite is provided to the device activated. In some instances, the nucleoside phosphoramidite is provided to the device with an activator. In some instances, nucleoside phosphoramidites are provided to the device in a 1.5, 2, 3, 4, 5, 6, 7, 8, 9, 10, 11, 12, 13, 14, 15, 16, 17, 18, 19, 20, 25, 30, 35, 40, 50, 60, 70, 80, 90, 100-fold excess or more over the substrate-bound nucleosides. In some instances, the addition of nucleoside phosphoramidite is performed in an anhydrous environment, for example, in anhydrous acetonitrile. Following addition of a nucleoside phosphoramidite, the device is optionally washed. In some instances, the coupling step is repeated one or more additional times, optionally with a wash step between nucleoside phosphoramidite additions to the substrate. In some instances, a polynucleotide synthesis method used herein comprises 1, 2, 3 or more sequential coupling steps. Prior to coupling, in many cases, the nucleoside bound to the device is de-protected by removal of a protecting group, where the protecting group functions to prevent polymerization. A common protecting group is 4,4′-dimethoxytrityl (DMT).

[0172] Following coupling, phosphoramidite polynucleotide synthesis methods optionally comprise a capping step. In a capping step, the growing polynucleotide is treated with a capping agent. A capping step is useful to block unreacted substrate-bound 5′-OH groups after coupling from further chain elongation, preventing the formation of polynucleotides with internal base deletions. Further, phosphoramidites activated with 1H-tetrazole may react, to a small extent, with the O6 position of guanosine. Without being bound by theory, upon oxidation with I₂/water, this side product, possibly via O6-N7 migration, may undergo depurination. The apurinic sites may end up being cleaved in the course of the final deprotection of the polynucleotide thus reducing the yield of the full-length product. The O6 modifications may be removed by treatment with the capping reagent prior to oxidation with I₂/water. In some instances, inclusion of a capping step during polynucleotide synthesis decreases the error rate as compared to synthesis without capping. As an example, the capping step comprises treating the substrate-bound polynucleotide with a mixture of acetic anhydride and 1-methylimidazole. Following a capping step, the device is optionally washed.

[0173] In some instances, following addition of a nucleoside phosphoramidite, and optionally after capping and one or more wash steps, the device bound growing nucleic acid is oxidized. The oxidation step comprises the phosphite triester is oxidized into a tetracoordinated phosphate triester, a protected precursor of the naturally occurring phosphate diester internucleoside linkage. In some instances, oxidation of the growing polynucleotide is achieved by treatment with iodine and water, optionally in the presence of a weak base (e.g., pyridine, lutidine, collidine). Oxidation may be carried out under anhydrous conditions using, e.g. tert-Butyl hydroperoxide or (1S)-(+)-(10-camphorsulfonyl)-oxaziridine (CSO). In some methods, a capping step is performed following oxidation. A second capping step allows for device drying, as residual water from oxidation that may persist can inhibit subsequent coupling. Following oxidation, the device and growing polynucleotide is optionally washed. In some instances, the step of oxidation is substituted with a sulfurization step to obtain polynucleotide phosphorothioates, wherein any capping steps can be performed after the sulfurization. Many reagents are capable of the efficient sulfur transfer, including but not limited to 3-(Dimethylaminomethylidene)amino)-3H-1,2,4-dithiazole-3-thione, DDTT, 3H-1,2-benzodithiol-3-one 1,1-dioxide, also known as Beaucage reagent, and N,N,N′N′-Tetraethylthiuram disulfide (TETD).

[0174] In order for a subsequent cycle of nucleoside incorporation to occur through coupling, the protected 5′ end of the device bound growing polynucleotide is removed so that the primary hydroxyl group is reactive with a next nucleoside phosphoramidite. In some instances, the protecting group is DMT and deblocking occurs with trichloroacetic acid in dichloromethane. Conducting detritylation for an extended time or with stronger than recommended solutions of acids may lead to increased depurination of solid support-bound polynucleotide and thus reduces the yield of the desired full-length product. Methods and compositions of the disclosure described herein provide for controlled deblocking conditions limiting undesired depurination reactions. In some instances, the device bound polynucleotide is washed after deblocking. In some instances, efficient washing after deblocking contributes to synthesized polynucleotides having a low error rate.

[0175] Methods for the synthesis of polynucleotides typically involve an iterating sequence of the following steps: application of a protected monomer to an actively functionalized surface (e.g., locus) to link with either the activated surface, a linker or with a previously deprotected monomer; deprotection of the applied monomer so that it is reactive with a subsequently applied protected monomer; and application of another protected monomer for linking. One or more intermediate steps include oxidation or sulfurization. In some instances, one or more wash steps precede or follow one or all of the steps.

[0176] Methods for phosphoramidite-based polynucleotide synthesis comprise a series of chemical steps. In some instances, one or more steps of a synthesis method involve reagent cycling, where one or more steps of the method comprise application to the device of a reagent useful for the step. For example, reagents are cycled by a series of liquid deposition and vacuum drying steps. For substrates comprising three-dimensional features such as wells, microwells, channels and the like, reagents are optionally passed through one or more regions of the device via the wells and/or channels.

[0177] Methods and systems described herein relate to polynucleotide synthesis devices for the synthesis of polynucleotides. The synthesis may be in parallel. For example, at least or about at least 2, 3, 4, 5, 6, 7, 8, 9, 10, 11, 12, 13, 14, 15, 16, 17, 18, 19, 20, 21, 22, 23, 24, 25, 30, 35, 40, 45, 50, 100, 150, 200, 250, 300, 350, 400, 450, 500, 550, 600, 650, 700, 750, 800, 850, 900, 1000, 10000, 50000, 75000, 100000 or more polynucleotides can be synthesized in parallel. The total number polynucleotides that may be synthesized in parallel may be from 2-100000, 3-50000, 4-10000, 5-1000, 6-900, 7-850, 8-800, 9-750, 10-700, 11-650, 12-600, 13-550, 14-500, 15-450, 16-400, 17-350, 18-300, 19-250, 20-200, 21-150,22-100, 23-50, 24-45, 25-40, 30-35. Those of skill in the art appreciate that the total number of polynucleotides synthesized in parallel may fall within any range bound by any of these values, for example 25-100. The total number of polynucleotides synthesized in parallel may fall within any range defined by any of the values serving as endpoints of the range. Total molar mass of polynucleotides synthesized within the device or the molar mass of each of the polynucleotides may be at least or at least about 10, 20, 30, 40, 50, 100, 250, 500, 750, 1000, 2000, 3000, 4000, 5000, 6000, 7000, 8000, 9000, 10000, 25000, 50000, 75000, 100000 picomoles, or more. The length of each of the polynucleotides or average length of the polynucleotides within the device may be at least or about at least 10, 15, 20, 25, 30, 35, 40, 45, 50, 100, 150, 200, 300, 400, 500 nucleotides, or more. The length of each of the polynucleotides or average length of the polynucleotides within the device may be at most or about at most 500, 400, 300, 200, 150, 100, 50, 45, 35, 30, 25, 20, 19, 18, 17, 16, 15, 14, 13, 12, 11, 10 nucleotides, or less. The length of each of the polynucleotides or average length of the polynucleotides within the device may fall from 10-500, 9-400, 11-300, 12-200, 13-150, 14-100, 15-50, 16-45, 17-40, 18-35, 19-25. Those of skill in the art appreciate that the length of each of the polynucleotides or average length of the polynucleotides within the device may fall within any range bound by any of these values, for example 100-300. The length of each of the polynucleotides or average length of the polynucleotides within the device may fall within any range defined by any of the values serving as endpoints of the range.

[0178] Methods for polynucleotide synthesis on a surface provided herein allow for synthesis at a fast rate. As an example, at least 3, 4, 5, 6, 7, 8, 9, 10, 11, 12, 13, 14, 15, 16, 17, 18, 19, 20, 21, 22, 23, 24, 25, 26, 27, 28, 29, 30, 35, 40, 45, 50, 55, 60, 70, 80, 90, 100, 125, 150, 175, 200 nucleotides per hour, or more are synthesized. Nucleotides include adenine, guanine, thymine, cytosine, uridine building blocks, or analogs/modified versions thereof. In some instances, libraries of polynucleotides are synthesized in parallel on substrate. For example, a device comprising about or at least about 100; 1,000; 10,000; 30,000; 75,000; 100,000; 1,000,000; 2,000,000; 3,000,000; 4,000,000; or 5,000,000 resolved loci is able to support the synthesis of at least the same number of distinct polynucleotides, wherein polynucleotide encoding a distinct sequence is synthesized on a resolved locus. In some instances, a library of polynucleotides is synthesized on a device with low error rates described herein in less than about three months, two months, one month, three weeks, 15, 14, 13, 12, 11, 10, 9, 8, 7, 6, 5, 4, 3, 2 days, 24 hours or less. In some instances, larger nucleic acids assembled from a polynucleotide library synthesized with low error rate using the substrates and methods described herein are prepared in less than about three months, two months, one month, three weeks, 15, 14, 13, 12, 11, 10, 9, 8, 7, 6, 5, 4, 3, 2 days, 24 hours or less.

[0179] In some instances, methods described herein provide for generation of a library of nucleic acids comprising variant nucleic acids differing at a plurality of codon sites. In some instances, a nucleic acid may have 1 site, 2 sites, 3 sites, 4 sites, 5 sites, 6 sites, 7 sites, 8 sites, 9 sites, 10 sites, 11 sites, 12 sites, 13 sites, 14 sites, 15 sites, 16 sites, 17 sites 18 sites, 19 sites, 20 sites, 30 sites, 40 sites, 50 sites, or more of variant codon sites.

[0180] In some instances, the one or more sites of variant codon sites may be adjacent. In some instances, the one or more sites of variant codon sites may not be adjacent and separated by 1, 2, 3, 4, 5, 6, 7, 8, 9, 10, or more codons.

[0181] In some instances, a nucleic acid may comprise multiple sites of variant codon sites, wherein all the variant codon sites are adjacent to one another, forming a stretch of variant codon sites. In some instances, a nucleic acid may comprise multiple sites of variant codon sites, wherein none the variant codon sites are adjacent to one another. In some instances, a nucleic acid may comprise multiple sites of variant codon sites, wherein some the variant codon sites are adjacent to one another, forming a stretch of variant codon sites, and some of the variant codon sites are not adjacent to one another.

[0182] Referring to the Figures, FIG. 2 illustrates an exemplary process workflow for synthesis of nucleic acids (e.g., genes) from shorter nucleic acids. The workflow is divided generally into phases: (1) de novo synthesis of a single stranded nucleic acid library, (2) joining nucleic acids to form larger fragments, (3) error correction, (4) quality control, and (5) shipment. Prior to de novo synthesis, an intended nucleic acid sequence or group of nucleic acid sequences is preselected. For example, a group of genes is preselected for generation.

[0183] Once large nucleic acids for generation are selected, a predetermined library of nucleic acids is designed for de novo synthesis. Various suitable methods are known for generating high density polynucleotide arrays. In the workflow example, a device surface layer is provided. In the example, chemistry of the surface is altered in order to improve the polynucleotide synthesis process. Areas of low surface energy are generated to repel liquid while areas of high surface energy are generated to attract liquids. The surface itself may be in the form of a planar surface or contain variations in shape, such as protrusions or microwells which increase surface area. In the workflow example, high surface energy molecules selected serve a dual function of supporting DNA chemistry, as disclosed in International Patent Application Publication WO/2015/021080, which is herein incorporated by reference in its entirety.

[0184] In situ preparation of polynucleotide arrays is generated on a solid support and utilizes single nucleotide extension process to extend multiple oligomers in parallel. A deposition device, such as a material deposition device 201, is designed to release reagents in a step wise fashion such that multiple polynucleotides extend, in parallel, one residue at a time to generate oligomers with a predetermined nucleic acid sequence 202. In some instances, polynucleotides are cleaved from the surface at this stage. Cleavage includes gas cleavage, e.g., with ammonia or methylamine.

[0185] The generated polynucleotide libraries are placed in a reaction chamber. In this exemplary workflow, the reaction chamber (also referred to as “nanoreactor”) is a silicon coated well, containing PCR reagents and lowered onto the polynucleotide library 203. Prior to or after the sealing 204 of the polynucleotides, a reagent is added to release the polynucleotides from the substrate. In the exemplary workflow, the polynucleotides are released subsequent to sealing of the nanoreactor 205. Once released, fragments of single stranded polynucleotides hybridize in order to span an entire long range sequence of DNA. Partial hybridization 205 is possible because each synthesized polynucleotide is designed to have a small portion overlapping with at least one other polynucleotide in the pool.

[0186] After hybridization, a PCA reaction is commenced. During the polymerase cycles, the polynucleotides anneal to complementary fragments and gaps are filled in by a polymerase. Each cycle increases the length of various fragments randomly depending on which polynucleotides find each other. Complementarity amongst the fragments allows for forming a complete large span of double stranded DNA 206.

[0187] After PCA is complete, the nanoreactor is separated from the device 207 and positioned for interaction with a device having primers for PCR 208. After sealing, the nanoreactor is subject to PCR 209 and the larger nucleic acids are amplified. After PCR 210, the nanochamber is opened 211, error correction reagents are added 212, the chamber is sealed 213 and an error correction reaction occurs to remove mismatched base pairs and/or strands with poor complementarity from the double stranded PCR amplification products 214. The nanoreactor is opened and separated 215. Error corrected product is next subject to additional processing steps, such as PCR and molecular bar coding, and then packaged 222 for shipment 223.

[0188] In some instances, quality control measures are taken. After error correction, quality control steps include for example interaction with a wafer having sequencing primers for amplification of the error corrected product 216, sealing the wafer to a chamber containing error corrected amplification product 217, and performing an additional round of amplification 218. The nanoreactor is opened 219 and the products are pooled 220 and sequenced 221. After an acceptable quality control determination is made, the packaged product 222 is approved for shipment 223.

[0189] In some instances, a nucleic acid generate by a workflow such as that in FIG. 2 is subject to mutagenesis using overlapping primers disclosed herein. In some instances, a library of primers are generated by in situ preparation on a solid support and utilize single nucleotide extension process to extend multiple oligomers in parallel. A deposition device, such as a material deposition device, is designed to release reagents in a step wise fashion such that multiple polynucleotides extend, in parallel, one residue at a time to generate oligomers with a predetermined nucleic acid sequence 202.

[0190] Computer Systems

[0191] Any of the systems described herein, may be operably linked to a computer and may be automated through a computer either locally or remotely. In various instances, the methods and systems of the disclosure may further comprise software programs on computer systems and use thereof. Accordingly, computerized control for the synchronization of the dispense/vacuum/refill functions such as orchestrating and synchronizing the material deposition device movement, dispense action and vacuum actuation are within the bounds of the disclosure. The computer systems may be programmed to interface between the user specified base sequence and the position of a material deposition device to deliver the correct reagents to specified regions of the substrate.

[0192] The computer system 300 illustrated in FIG. 3 may be understood as a logical apparatus that can read instructions from media 311 and/or a network port 305, which can optionally be connected to server 309 having fixed media 312. The system, such as shown in FIG. 3 can include a CPU 301, disk drives 303, optional input devices such as keyboard 315 and/or mouse 316 and optional monitor 307. Data communication can be achieved through the indicated communication medium to a server at a local or a remote location. The communication medium can include any means of transmitting and/or receiving data. For example, the communication medium can be a network connection, a wireless connection or an internet connection. Such a connection can provide for communication over the World Wide Web. It is envisioned that data relating to the present disclosure can be transmitted over such networks or connections for reception and/or review by a party 322 as illustrated in FIG. 3.

[0193] FIG. 4 is a block diagram illustrating a first example architecture of a computer system 400 that can be used in connection with example instances of the present disclosure. As depicted in FIG. 4, the example computer system can include a processor 402 for processing instructions. Non-limiting examples of processors include: Intel Xeon™ processor, AMD Opteron™ processor, Samsung 32-bit RISC ARM 1176JZ(F)-S v1.0 ™ processor, ARM Cortex-A8 Samsung S5PC100™ processor, ARM Cortex-A8 Apple A4 ™ processor, Marvell PXA 930 ™ processor, or a functionally-equivalent processor. Multiple threads of execution can be used for parallel processing. In some instances, multiple processors or processors with multiple cores can also be used, whether in a single computer system, in a cluster, or distributed across systems over a network comprising a plurality of computers, cell phones, and/or personal data assistant devices.

[0194] As illustrated in FIG. 4, a high speed cache 404 can be connected to, or incorporated in, the processor 402 to provide a high speed memory for instructions or data that have been recently, or are frequently, used by processor 402. The processor 402 is connected to a north bridge 406 by a processor bus 408. The north bridge 406 is connected to random access memory (RAM) 410 by a memory bus 412 and manages access to the RAM 410 by the processor 402. The north bridge 406 is also connected to a south bridge 414 by a chipset bus 416. The south bridge 414 is, in turn, connected to a peripheral bus 418. The peripheral bus can be, for example, PCI, PCI-X, PCI Express, or other peripheral bus. The north bridge and south bridge are often referred to as a processor chipset and manage data transfer between the processor, RAM, and peripheral components on the peripheral bus 418. In some alternative architectures, the functionality of the north bridge can be incorporated into the processor instead of using a separate north bridge chip. In some instances, system 400 can include an accelerator card 422 attached to the peripheral bus 418. The accelerator can include field programmable gate arrays (FPGAs) or other hardware for accelerating certain processing. For example, an accelerator can be used for adaptive data restructuring or to evaluate algebraic expressions used in extended set processing.

[0195] Software and data are stored in external storage 424 and can be loaded into RAM 410 and/or cache 404 for use by the processor. The system 400 includes an operating system for managing system resources; non-limiting examples of operating systems include: Linux, Windows™, MACOS™, BlackBerry OS™, iOS™, and other functionally-equivalent operating systems, as well as application software running on top of the operating system for managing data storage and optimization in accordance with example instances of the present disclosure. In this example, system 400 also includes network interface cards (NICs) 420 and 421 connected to the peripheral bus for providing network interfaces to external storage, such as Network Attached Storage (NAS) and other computer systems that can be used for distributed parallel processing.

[0196] FIG. 5 is a diagram showing a network 500 with a plurality of computer systems 502a, and 502b, a plurality of cell phones and personal data assistants 502c, and Network Attached Storage (NAS) 504a, and 504b. In example instances, systems 502a, 502b, and 502c can manage data storage and optimize data access for data stored in Network Attached Storage (NAS) 504a and 504b. A mathematical model can be used for the data and be evaluated using distributed parallel processing across computer systems 502a, and 502b, and cell phone and personal data assistant systems 502c. Computer systems 502a, and 502b, and cell phone and personal data assistant systems 502c can also provide parallel processing for adaptive data restructuring of the data stored in Network Attached Storage (NAS) 504a and 504b. FIG. 5 illustrates an example only, and a wide variety of other computer architectures and systems can be used in conjunction with the various instances of the present disclosure. For example, a blade server can be used to provide parallel processing. Processor blades can be connected through a back plane to provide parallel processing. Storage can also be connected to the back plane or as Network Attached Storage (NAS) through a separate network interface. In some example instances, processors can maintain separate memory spaces and transmit data through network interfaces, back plane or other connectors for parallel processing by other processors. In other instances, some or all of the processors can use a shared virtual address memory space.

[0197] FIG. 6 is a block diagram of a multiprocessor computer system using a shared virtual address memory space in accordance with an example instance. The system includes a plurality of processors 602a-f that can access a shared memory subsystem 604. The system incorporates a plurality of programmable hardware memory algorithm processors (MAPs) 606a-f in the memory subsystem 604. Each MAP 606a-f can comprise a memory 608a-f and one or more field programmable gate arrays (FPGAs) 610a-f. The MAP provides a configurable functional unit and particular algorithms or portions of algorithms can be provided to the FPGAs 610a-f for processing in close coordination with a respective processor. For example, the MAPs can be used to evaluate algebraic expressions regarding the data model and to perform adaptive data restructuring in example instances. In this example, each MAP is globally accessible by all of the processors for these purposes. In one configuration, each MAP can use Direct Memory Access (DMA) to access an associated memory 608a-f, allowing it to execute tasks independently of, and asynchronously from the respective microprocessor 602a-f. In this configuration, a MAP can feed results directly to another MAP for pipelining and parallel execution of algorithms.

[0198] The above computer architectures and systems are examples only, and a wide variety of other computer, cell phone, and personal data assistant architectures and systems can be used in connection with example instances, including systems using any combination of general processors, co-processors, FPGAs and other programmable logic devices, system on chips (SOCs), application specific integrated circuits (ASICs), and other processing and logic elements. In some instances, all or part of the computer system can be implemented in software or hardware. Any variety of data storage media can be used in connection with example instances, including random access memory, hard drives, flash memory, tape drives, disk arrays, Network Attached Storage (NAS) and other local or distributed data storage devices and systems.

[0199] In example instances, the computer system can be implemented using software modules executing on any of the above or other computer architectures and systems. In other instances, the functions of the system can be implemented partially or completely in firmware, programmable logic devices such as field programmable gate arrays (FPGAs) as referenced in FIG. 4, system on chips (SOCs), application specific integrated circuits (ASICs), or other processing and logic elements. For example, the Set Processor and Optimizer can be implemented with hardware acceleration through the use of a hardware accelerator card, such as accelerator card 422 illustrated in FIG. 4.

[0200] The following examples are set forth to illustrate more clearly the principle and practice of embodiments disclosed herein to those skilled in the art and are not to be construed as limiting the scope of any claimed embodiments. Unless otherwise stated, all parts and percentages are on a weight basis.

### EXAMPLES

[0201] The following examples are given for the purpose of illustrating various embodiments of the disclosure and are not meant to limit the present disclosure in any fashion. The present examples, along with the methods described herein are presently representative of preferred embodiments, are exemplary, and are not intended as limitations on the scope of the disclosure. Changes therein and other uses which are encompassed within the spirit of the disclosure as defined by the scope of the claims will occur to those skilled in the art.

### Example 1: Functionalization of a Device Surface

[0202] A device was functionalized to support the attachment and synthesis of a library of polynucleotides. The device surface was first wet cleaned using a piranha solution comprising 90% H₂SO₄ and 10% H₂O₂ for 20 minutes. The device was rinsed in several beakers with DI water, held under a DI water gooseneck faucet for 5 min, and dried with N₂. The device was subsequently soaked in NH₄OH (1:100; 3 mL:300 mL) for 5 min, rinsed with DI water using a handgun, soaked in three successive beakers with DI water for 1 min each, and then rinsed again with DI water using the handgun. The device was then plasma cleaned by exposing the device surface to O₂. A SAMCO PC-300 instrument was used to plasma etch O₂ at 250 watts for 1 min in downstream mode.

[0203] The cleaned device surface was actively functionalized with a solution comprising N-(3-triethoxysilylpropyl)-4-hydroxybutyramide using a YES-1224P vapor deposition oven system with the following parameters: 0.5 to 1 torr, 60 min, 70° C., 135° C. vaporizer. The device surface was resist coated using a Brewer Science 200×spin coater. SPR™ 3612 photoresist was spin coated on the device at 2500 rpm for 40 sec. The device was pre-baked for 30 min at 90° C. on a Brewer hot plate. The device was subjected to photolithography using a Karl Suss MA6 mask aligner instrument. The device was exposed for 2.2 sec and developed for 1 min in MSF 26A. Remaining developer was rinsed with the handgun and the device soaked in water for 5 min. The device was baked for 30 min at 100° C. in the oven, followed by visual inspection for lithography defects using a Nikon L200. A descum process was used to remove residual resist using the SAMCO PC-300 instrument to 02 plasma etch at 250 watts for 1 min.

[0204] The device surface was passively functionalized with a 100 μL solution of perfluorooctyltrichlorosilane mixed with 10 μL light mineral oil. The device was placed in a chamber, pumped for 10 min, and then the valve was closed to the pump and left to stand for 10 min. The chamber was vented to air. The device was resist stripped by performing two soaks for 5 min in 500 mL NMP at 70° C. with ultrasonication at maximum power (9 on Crest system). The device was then soaked for 5 min in 500 mL isopropanol at room temperature with ultrasonication at maximum power. The device was dipped in 300 mL of 200 proof ethanol and blown dry with N₂. The functionalized surface was activated to serve as a support for polynucleotide synthesis.

### Example 2: Synthesis of a 50-Mer Sequence on an Oligonucleotide Synthesis Device

[0205] A two dimensional oligonucleotide synthesis device was assembled into a flowcell, which was connected to a flowcell (Applied Biosystems (ABI394 DNA Synthesizer”). The two-dimensional oligonucleotide synthesis device was uniformly functionalized with N-(3-TRIETHOXYSILYLPROPYL)-4-HYDROXYBUTYRAMIDE (Gelest) was used to synthesize an exemplary polynucleotide of 50 bp (“50-mer polynucleotide”) using polynucleotide synthesis methods described herein.

[0206] The sequence of the 50-mer was as described. 5′AGACAATCAACCATTTGGGGTGGACAGCCTTGACCTCTAGACTTCGGCAT ##TTTTTT TTTT3′ (SEQ ID NO: 3194), where #denotes Thymidine-succinyl hexamide CED phosphoramidite (CLP-2244 from ChemGenes), which is a cleavable linker enabling the release of oligos from the surface during deprotection.

[0207] The synthesis was done using standard DNA synthesis chemistry (coupling, capping, oxidation, and deblocking) according to the protocol in Table 2 and an ABI synthesizer.

TABLE 2
Table 2: Synthesis protocols

| General DNA Synthesis | | Time |
|---|---|---|
| Process Name | Process Step | (sec) |
| WASH (Acetonitrile Wash | Acetonitrile System Flush | 4 |
| Flow) | Acetonitrile to Flowcell | 23 |
| | N2 System Flush | 4 |
| | Acetonitrile System Flush | 4 |
| DNA BASE ADDITION | Activator Manifold Flush | 2 |
| (Phosphoramidite + | Activator to Flowcell | 6 |
| Activator Flow) | Activator + | 6 |
| | Phosphoramidite to | |
| | Flowcell | |
| | Activator to Flowcell | 0.5 |
| | Activator + | 5 |
| | Phosphoramidite to | |
| | Flowcell | |
| | Activator to Flowcell | 0.5 |
| | Activator + | 5 |
| | Phosphoramidite to | |
| | Flowcell | |
| | Activator to Flowcell | 0.5 |
| | Activator + | 5 |
| | Phosphoramidite to | |
| | Flowcell | |
| | Incubate for 25 sec | 25 |
| WASH (Acetonitrile Wash | Acetonitrile System Flush | 4 |
| Flow) | Acetonitrile to Flowcell | 15 |
| | N2 System Flush | 4 |
| | Acetonitrile System Flush | 4 |
| DNA BASE ADDITION | Activator Manifold Flush | 2 |
| (Phosphoramidite + | Activator to Flowcell | 5 |
| Activator Flow) | Activator + | 18 |
| | Phosphoramidite to | |
| | Flowcell | |
| | Incubate for 25 sec | 25 |
| WASH (Acetonitrile Wash | Acetonitrile System Flush | 4 |
| Flow) | Acetonitrile to Flowcell | 15 |
| | N2 System Flush | 4 |
| | Acetonitrile System Flush | 4 |
| CAPPING (CapA + B, 1:1, | CapA + B to Flowcell | 15 |
| Flow) | | |
| WASH (Acetonitrile Wash | Acetonitrile System Flush | 4 |
| Flow) | Acetonitrile to Flowcell | 15 |
| | Acetonitrile System Flush | 4 |
| OXIDATION (Oxidizer | Oxidizer to Flowcell | 18 |
| Flow) | | |
| WASH (Acetonitrile Wash | Acetonitrile System Flush | 4 |
| Flow) | N2 System Flush | 4 |
| | Acetonitrile System Flush | 4 |
| | Acetonitrile to Flowcell | 15 |
| | Acetonitrile System Flush | 4 |
| | Acetonitrile to Flowcell | 15 |
| | N2 System Flush | 4 |
| | Acetonitrile System Flush | 4 |
| | Acetonitrile to Flowcell | 23 |
| | N2 System Flush | 4 |
| | Acetonitrile System Flush | 4 |
| DEBLOCKING (Deblock | Deblock to Flowcell | 36 |
| Flow) | | |
| WASH (Acetonitrile Wash | Acetonitrile System Flush | 4 |
| Flow) | N2 System Flush | 4 |
| | Acetonitrile System Flush | 4 |
| | Acetonitrile to Flowcell | 18 |
| | N2 System Flush | 4.13 |
| | Acetonitrile System Flush | 4.13 |
| | Acetonitrile to Flowcell | 15 |

[0208] The phosphoramidite/activator combination was delivered similar to the delivery of bulk reagents through the flowcell. No drying steps were performed as the environment stays “wet” with reagent the entire time.

[0209] The flow restrictor was removed from the ABI 394 synthesizer to enable faster flow. Without flow restrictor, flow rates for amidites (0.1M in ACN), Activator, (0.25M Benzoylthiotetrazole (“BTT”; 30-3070-xx from GlenResearch) in ACN), and Ox (0.02M 12 in 20% pyridine, 10% water, and 70% THF) were roughly ˜100 uL/sec, for acetonitrile (“ACN”) and capping reagents (1:1 mix of CapA and CapB, wherein CapA is acetic anhydride in THF/Pyridine and CapB is 16% 1-methylimidizole in THF), roughly ˜200 uL/sec, and for Deblock (3% dichloroacetic acid in toluene), roughly ˜300 uL/sec (compared to ˜50 uL/sec for all reagents with flow restrictor). The time to completely push out Oxidizer was observed, the timing for chemical flow times was adjusted accordingly and an extra ACN wash was introduced between different chemicals. After polynucleotide synthesis, the chip was deprotected in gaseous ammonia overnight at 75 psi. Five drops of water were applied to the surface to recover polynucleotides. The recovered polynucleotides were then analyzed on a BioAnalyzer small RNA chip.

### Example 3: Synthesis of a 100-Mer Sequence on an Oligonucleotide Synthesis Device

[0210] The same process as described in Example 2 for the synthesis of the 50-mer sequence was used for the synthesis of a 100-mer polynucleotide (“100-mer polynucleotide”; 5′ CGGGATCCTTATCGTCATCGTCGTACAGATCCCGACCCATTTGCTGTCCACCAGTCATG CTAGCCATACCATGATGATGATGATGATGAGAACCCCGCAT ##TTTTTTTTTT3′ (SEQ ID NO: 3195), where #denotes Thymidine-succinyl hexamide CED phosphoramidite (CLP-2244 from ChemGenes) on two different silicon chips, the first one uniformly functionalized with N-(3-TRIETHOXYSILYLPROPYL)-4-HYDROXYBUTYRAMIDE and the second one functionalized with 5/95 mix of 11-acetoxyundecyltriethoxysilane and n-decyltriethoxysilane, and the polynucleotides extracted from the surface were analyzed on a BioAnalyzer instrument.

[0211] All ten samples from the two chips were further PCR amplified using a forward (5′ATGCGGGGTTCTCATCATC3′) (SEQ ID NO: 3196) and a reverse (5′CGGGATCCTTATCGTCATCG3′) (SEQ ID NO: 3197) primer in a 50 uL PCR mix (25 uL NEB Q5 mastermix, 2.5 uL 10 uM Forward primer, 2.5 uL 10 uM Reverse primer, 1 uL polynucleotide extracted from the surface, and water up to 50 uL) using the following thermalcycling program:

[0212] 98° C., 30 sec

[0213] 98° C., 10 sec; 63° C., 10 sec; 72° C., 10 sec; repeat 12 cycles

[0214] 72° C., 2 min

[0215] The PCR products were also run on a BioAnalyzer, demonstrating sharp peaks at the 100-mer position. Next, the PCR amplified samples were cloned, and Sanger sequenced. Table 3 summarizes the results from the Sanger sequencing for samples taken from spots 1-5 from chip 1 and for samples taken from spots 6-10 from chip 2.

TABLE 3
Sequencing results

| | | |
|---|---|---|
| Spot | Error rate | Cycle efficiency |

| | | | |
|---|---|---|---|
| 1 | 1/763 | bp | 99.87% |
| 2 | 1/824 | bp | 99.88% |
| 3 | 1/780 | bp | 99.87% |
| 4 | 1/429 | bp | 99.77% |
| 5 | 1/1525 | bp | 99.93% |
| 6 | 1/1615 | bp | 99.94% |
| 7 | 1/531 | bp | 99.81% |
| 8 | 1/1769 | bp | 99.94% |
| 9 | 1/854 | bp | 99.88% |
| 10 | 1/1451 | bp | 99.93% |

[0216] Thus, the high quality and uniformity of the synthesized polynucleotides were repeated on two chips with different surface chemistries. Overall, 89% of the 100-mers that were sequenced were perfect sequences with no errors, corresponding to 233 out of 262.

[0217] Table 4 summarizes error characteristics for the sequences obtained from the polynucleotides samples from spots 1-10.

TABLE 4
Error characteristics

| | Sample ID/Spot no. | | | | |
|---|---|---|---|---|---|
| | OSA_0046/1 | OSA_0047/2 | OSA_0048/3 | OSA_0049/4 | OSA_0050/5 |
| Total | 32 | 32 | 32 | 32 | 32 |
| Sequences | | | | | |
| Sequencing | 25 of 28 | 27 of 27 | 26 of 30 | 21 of 23 | 25 of 26 |
| Quality | | | | | |
| Oligo | 23 of 25 | 25 of 27 | 22 of 26 | 18 of 21 | 24 of 25 |
| Quality | | | | | |
| ROI | 2500 | 2698 | 2561 | 2122 | 2499 |
| Match | | | | | |
| Count | | | | | |
| ROI | 2 | 2 | 1 | 3 | 1 |
| Mutation | | | | | |
| ROI Multi | 0 | 0 | 0 | 0 | 0 |
| Base | | | | | |
| Deletion | | | | | |
| ROI Small | 1 | 0 | 0 | 0 | 0 |
| Insertion | | | | | |
| ROI | 0 | 0 | 0 | 0 | 0 |
| Single | | | | | |
| Base | | | | | |
| Deletion | | | | | |
| Large | 0 | 0 | 1 | 0 | 0 |
| Deletion | | | | | |
| Count | | | | | |
| Mutation: | 2 | 2 | 1 | 2 | 1 |
| G > A | | | | | |
| Mutation: | 0 | 0 | 0 | 1 | 0 |
| T > C | | | | | |
| ROI Error | 3 | 2 | 2 | 3 | 1 |
| Count | | | | | |
| ROI Error | Err: ~1 | Err: ~1 | Err: ~1 | Err: ~1 | Err: ~1 |
| Rate | in 834 | in 1350 | in 1282 | in 708 | in 2500 |
| ROI | MP Err: ~1 | MP Err: ~1 | MP Err: ~1 | MP Err: ~1 | MP Err: ~1 |
| Minus | in 763 | in 824 | in 780 | in 429 | in 1525 |
| Primer | | | | | |
| Error Rate | | | | | |
| | Sample ID/Spot no. | | | | |
| | OSA_0051/6 | OSA_0052/7 | OSA_0053/8 | OSA_0054/9 | OSA_0055/10 |
| Total | 32 | 32 | 32 | 32 | 32 |
| Sequences | | | | | |
| Sequencing | 29 of 30 | 27 of 31 | 29 of 31 | 28 of 29 | 25 of 28 |
| Quality | | | | | |
| Oligo | 25 of 29 | 22 of 27 | 28 of 29 | 26 of 28 | 20 of 25 |
| Quality | | | | | |
| ROI | 2666 | 2625 | 2899 | 2798 | 2348 |
| Match | | | | | |
| Count | | | | | |
| ROI | 0 | 2 | 1 | 2 | 1 |
| Mutation | | | | | |
| ROI Multi | 0 | 0 | 0 | 0 | 0 |
| Base | | | | | |
| Deletion | | | | | |
| ROI Small | 0 | 0 | 0 | 0 | 0 |
| Insertion | | | | | |
| ROI | 0 | 0 | | 0 | 0 |
| Single | | | | | |
| Base | | | | | |
| Deletion | | | | | |
| Large | 1 | 1 | 0 | 0 | 0 |
| Deletion | | | | | |
| Count | | | | | |
| Mutation: | 0 | 2 | 1 | 2 | 1 |
| G > A | | | | | |
| Mutation: | 0 | 0 | 0 | 0 | 0 |
| T > C | | | | | |
| ROI Error | 1 | 3 | 1 | 2 | 1 |
| Count | | | | | |
| ROI Error | Err: ~1 | Err: ~1 | Err: ~ 1 | Err: ~1 | Err: ~1 |
| Rate | in 2667 | in 876 | in 2900 | in 1400 | in 2349 |
| ROI | MP Err: ~1 | MP Err: ~1 | MP Err: ~1 | MP Err: ~1 | MP Err: ~1 |
| Minus | in 1615 | in 531 | in 1769 | in 854 | in 1451 |
| Primer | | | | | |
| Error Rate | | | | | |

### Example 4: Panning and Screening for Identification of Antibodies for SARS-CoV-2 Variants

[0218] This example describes identification of antibodies for SARS-CoV-2 variants. FIG. 7 depicts different mutations found in several SARS-CoV-2 variants.

[0219] Phage displayed scFv, VHH, and Fab libraries were panned for binding to biotinylated SARS-CoV-2 S1 variants 501.V2 and B.1.1.7. Biotinylated antigen was bound to streptavidin coated magnetic beads at a density of 100 μmol antigen per mg of beads (Thermo Fisher #11206D). Phage libraries were blocked with 5% BSA in PBS. Following magnetic bead depletion for 1 hour at room temperature (RT), the beads were removed, and phage supernatant was transferred to 1 mg of antigen-bound beads in 1 mL PBS and incubated at RT with rotation for 1 hour. Non-binding clones were washed away by addition of 1 mL PBST, increasing the number of washes with each panning round. Trypsin was used to elute the phage bound to the antigen-bead complex. Phage were amplified in TG1 E. coli for the next round of selection. This selection strategy was repeated for four rounds, with successively lower amounts of antigen per round. Following all four selection rounds, 400 clones from each of round 2, 3, and 4 were selected for phage expression and phage ELISA screening. Data from the panning is seen in Tables 5-6.

TABLE 5
Panning and screening for identification
of antibodies for SARS-CoV-2 variants

| | | # hits | # |
|---|---|---|---|
| Arm | Round | sequencing | reformats |
| Antibody 1 | 3 | 42 | 36 |
| | 4 | 0 | |
| Antibody 2 | 3 | 1 | |
| | 4 | 0 | |
| Antibody 3 | 3 | 54 | 31 |
| | 4 | 1 | |
| Antibody 4 | 3 | 1 | |
| | 4 | 0 | |
| Antibody 5 | 3 | 0 | |
| | 4 | 0 | |
| Antibody 6 | 3 | 29 | *All were |
| | | | VHH |
| | 4 | 0 | |
| Antibody 7 | 3 | 59 | 45 |
| | 4 | 7 | |
| Antibody 8 | 3 | 14 | 10 |
| | 4 | 0 | |

TABLE 6
Reformat list

| Project | Target | Reformat |
|---|---|---|
| Antibody 1 | S1501.V2-Fc | 36 IgG1 |
| Antibody 3 | S1 501.V2-Fc | 31 VHH-Fc |
| Antibody 7 | S1 B.1.1.7-Fc | 45 VHH-Fc |
| Antibody 8 | S1 B.1.1.7-Fc | 10 VHH-Fc |

[0220] Carterra kinetics rank ordered by affinity are depicted in FIGS. 9A-9F, FIG. 23, and Table 7. In Table 7, the antibodies indicated with a * are cross-reactive, including binding to the India variant mutation L452R E484Q. These are all part of the same CAADGVPEYSDYASGPVW (SEQ ID NO: 1369) clonotype.

TABLE 7
Carterra kinetics

| | | | | | | | | Antibody | |
|---|---|---|---|---|---|---|---|---|---|
| | | | | | | | | 178-10_ | |
| | | | | | | Antibody | Antibody | His | |
| | | | | | | 178- | 178- | CA_W152C_ | S1 RBD |
| | | | | | SARS- | 09_His | 08_His | L45 | L452R |
| | | | | SEQ | CoV-2 S1 | B.1.1.7 | 501.V2 | 2R_D614G | E484Q |
| | | | | ID | (Acro) | (27080) | (27079) | (27081) | (Acro) |
| Variant | Target | Library | CDRH3 | NO: | KD (nM) | KD (nM) | KD (nM) | KD (nM) | KD (nM) |
| 7-6 | B.1.1.7 | hShuffle | CAAALSEVWRGSE | 1375 | 42.4 | 42.4 | n.b. | n.b. | n.b. |
| | | VHH | NLREGYDW | | | | | | |
| 3-31* | 501.V2 | VHH | CAADGVPEYSDYA | 1369 | 21.0 | 16.1 | 96652.0 | 41.0 | 16.2 |
| | | hShuffle | SGPVW | | | | | | |
| 7-8 | B.1.1.7 | hShuffle | CAADGVPEYSDYA | 1369 | 52.8 | n.b. | n.b. | n.b. | n.b. |
| | | VHH | SGPVW | | | | | | |
| 7-14* | B.1.1.7 | hShuffle | CAADGVPEYSDYA | 1369 | 20.8 | 19.2 | 16.9 | 43.1 | 20.1 |
| | | VHH | SGPVW | | | | | | |
| 7-26* | B.1.1.7 | VHH | CAADGVPEYSDYA | 1369 | 24.8 | 22.7 | 74.9 | 34.8 | 18.0 |
| | | hShuffle | SGPVW | | | | | | |
| 7-32 | B.1.1.7 | hShuffle | CAADGVPEYSDYA | 1369 | 48.5 | 62.4 | n.b. | n.b. | n.b. |
| | | VHH | SGPVW | | | | | | |
| 7-33 | B.1.1.7 | hShuffle | CAADGVPEYSDYA | 1369 | 21.2 | 21.1 | n.b. | 80.7 | 32467.6 |
| | | VHH | SGPVW | | | | | | |
| 7-37* | B.1.1.7 | hShuffle | CAADGVPEYSDYA | 1369 | 21.6 | 17.8 | 122.9 | 45.1 | 58.5 |
| | | VHH | SGPVW | | | | | | |
| 7-11 | B.1.1.7 | hShuffle | CAADRAADFFAQR | 1380 | 80.6 | 164242.3 | n.b. | n.b. | n.b. |
| | | VHH | DEYDW | | | | | | |
| 7-30 | B.1.1.7 | hShuffle | CAAEVRNGSDYLPI | 1399 | 48.7 | 32.0 | n.b. | 55.9 | n.b. |
| | | VHH | DW | | | | | | |
| 3-16 | 501.V2 | hShuffle | CAAFDGYSGSDW | 1354 | 2550.3 | n.b. | n.b. | n.b. | n.b. |
| | | VHH | | | | | | | |
| 7-25 | B.1.1.7 | hShuffle | CAAFDGYTGSDW | 1351 | 1316.1 | 10.0 | n.b. | n.b. | n.b. |
| | | VHH | | | | | | | |
| 7-31 | B.1.1.7 | hShuffle | CAAQTEDSAQYIW | 1400 | 227.9 | 387.6 | n.b. | n.b. | n.b. |
| | | VHH | | | | | | | |
| 7-29 | B.1.1.7 | VHH | CAARRWIPPGPIW | 1398 | 31.2 | 54.8 | n.b. | n.b. | n.b. |
| | | hShuffle | | | | | | | |
| 7-09 | B.1.1.7 | VHH | CAKEDVGKPFDW | 1378 | 24.1 | 23.2 | n.b. | 38.7 | 177248.4 |
| | | hShuffle | | | | | | | |
| 7-18 | B.1.1.7 | VHH | CAKEDVGKPFDW | 1378 | 4766.2 | 862396.3 | n.b. | n.b. | n.b. |
| | | hShuffle | | | | | | | |
| 7-21 | B.1.1.7 | hShuffle | CAKEDVGKPFDW | 1378 | 27.1 | 35.6 | n.b. | 276.7 | n.b. |
| | | VHH | | | | | | | |
| 7-40 | B.1.1.7 | VHH | CAKEDVGKPFDW | 1378 | 85612.6 | n.b. | n.b. | n.b. | n.b. |
| | | hShuffle | | | | | | | |
| 7-41 | B.1.1.7 | hShuffle | CAKEDVGKPFDW | 1378 | 48.1 | 35.6 | n.b. | 95.5 | n.b. |
| | | VHH | | | | | | | |
| 7-45 | B.1.1.7 | hShuffle | CAKEDVGKPFDW | 1378 | 36.3 | 43.4 | n.b. | n.b. | n.b. |
| | | VHH | | | | | | | |
| 7-22 | B.1.1.7 | VHH | CAKQDVGKPFDW | 1391 | 40.9 | 41.7 | n.b. | 698.5 | n.b. |
| | | hShuffle | | | | | | | |
| 3-24 | 501.V2 | VHH | CALRVRPYGQYDW | 1362 | n.b. | 2606.7 | 585.5 | n.b. | n.b. |
| | | hShuffle | | | | | | | |
| 8-3 | B.1.1.7 | VHH | CAREDYYDSSGYS | 1417 | 18366.4 | 40.5 | 1.7 | 100.5 | n.b. |
| | | hShuffle | W | | | | | | |
| | | HI | | | | | | | |
| 8-10 | B.1.1.7 | VHH | CAREGYYYDSSGY | 1424 | 657633.8 | 376.8 | n.b. | n.b. | n.b. |
| | | hShuffle | PYYFDYW | | | | | | |
| | | HI | | | | | | | |
| 8-2 | B.1.1.7 | VHH | CARERRYYDSSGY | 1416 | 4208.4 | 27.1 | n.b. | n.b. | n.b. |
| | | hShuffle | PYYFDYW | | | | | | |
| | | HI | | | | | | | |
| 7-24 | B.1.1.7 | VHH | CAREVGLYYYGSG | 1393 | 4257477.8 | n.b. | n.b. | n.b. | n.b. |
| | | hShuffle | SSSRRLLGRIDYYF | | | | | | |
| | | | DYW | | | | | | |
| 8-06 | B.1.1.7 | VHH | CARWGPFDIW | 1420 | 37.7 | 141.0 | n.b. | n.b. | n.b. |
| | | hShuffle | | | | | | | |
| | | HI | | | | | | | |
| 7-17 | B.1.1.7 | VHH | CASAYNPGIGYDW | 1386 | 60.4 | 39.8 | n.b. | n.b. | n.b. |
| | | hShuffle | | | | | | | |
| 3-17 | 501.V2 | VHH | CATGPYRSYFARSY | 1355 | 141.2 | n.b. | n.b. | n.b. | n.b. |
| | | hShuffle | LW | | | | | | |
| 3-28 | 501.V2 | VHH | CAVDLSGDAVYD | 1366 | 52.2 | 16.6 | 22.0 | n.b. | n.b. |
| | | hShuffle | W | | | | | | |
| 8-5 | B.1.1.7 | VHH | CAVVAMRMVTTE | 1419 | 665983.2 | 224.2 | n.b. | n.b. | n.b. |
| | | hShuffle | GPDVLDVW | | | | | | |
| | | HI | | | | | | | |

[0221] Tables 8A-8B depict a set of cross-reactive leads to test in the Vero E6 competition assay. Many of the cross-reactive leads are part of the same CAADGVPEYSDYASGPVW (SEQ ID NO: 31981 clonotype. Tables 8C-8D depict variant binding.

TABLE 8A
Cross-reactive variants

| | | | SEQ | | SEQ | | SEQ |
|---|---|---|---|---|---|---|---|
| Var- | Tar- | | ID | | ID | | ID |
| iant | get | CDRH1 | NO | CDRH2 | NO | CDRH3 | NO |
| 5A-1 | Wuhan | GTFSS | 3199 | VAAIS | 3209 | CAKED | 3219 |
| | | IGMG | | WDGGA | | VGKPF | |
| | | | | TAYA | | DW | |
| 6A-3 | Wuhan | FTFSP | 3200 | VATIN | 3210 | CARVD | 3220 |
| | | SWMG | | EYGGR | | RDFDY | |
| | | | | NYA | | W | |
| 6A-63 | Wuhan | QTFNM | 3201 | VAAIG | 3211 | CWRLG | 3221 |
| | | G | | SGGST | | NDYFD | |
| | | | | SYA | | YW | |
| 3-28 | 501. | FTFRR | 3202 | SAISG | 3212 | CAVDL | 3222 |
| | V2 | YDMG | | GLAYY | | SGDAV | |
| | | | | A | | YDW | |
| 3-31 | 501. | STFSI | 3203 | AGITS | 3213 | CAADG | 3223 |
| | V2 | NAMG | | SGGYT | | VPEYS | |
| | | | | NYA | | DYASG | |
| | | | | | | PVW | |
| 7-09 | B.1. | GTFSS | 3204 | AAISW | 3214 | CAKED | 3224 |
| | 1.7 | IGMG | | DGGAT | | VGKPF | |
| | | | | AYA | | DW | |
| 7-14 | B.1. | STFSI | 3205 | AGISR | 3215 | CAADG | 3225 |
| | 1.7 | NAMG | | GGTTN | | VPEYS | |
| | | | | YA | | DYASG | |
| | | | | | | PVW | |
| 7-26 | B.1. | STFSI | 3206 | AGITS | 3216 | CAADG | 3226 |
| | 1.7 | NAMG | | SGGYT | | VPEYS | |
| | | | | NYA | | DYASG | |
| | | | | | | PVW | |
| 7-30 | B.1. | RTFSM | 3207 | ASISS | 3217 | CAAEV | 3227 |
| | 1.7 | HAMG | | QGRTN | | RNGSD | |
| | | | | YA | | YLPID | |
| | | | | | | W | |
| 7-37 | B.1. | STLSI | 3208 | AGITR | 3218 | CAADG | 3228 |
| | 1.7 | NAMG | | SGSVT | | VPEYS | |
| | | | | NYA | | DYASG | |
| | | | | | | PVW | |

TABLE 8B
Cross-reactive variants

| | | Antibody | Antibody | Antibody | S1 RBD |
|---|---|---|---|---|---|
| | SARS- | 178-09_His | 178-08_His | 178-10_His | L452R |
| | CoV-2 S1 | B.l.1.7 | 501.V2 | CA_W152C_L452R_D614G | E484Q |
| | (Acro) | (27080) | (27079) | (27081) | (Acro) |
| Clone | KD (nM) | KD (nM) | KD (nM) | KD (nM) | KD (nM) |
| 5A-1 | 6.6 | t.b.d. | t.b.d. | 12.7 | t.b.d. |
| 6A-3 | 31.5 | t.b.d. | t.b.d. | 26.8 | t.b.d. |
| 6A-63 | 46.4 | t.b.d. | t.b.d. | n.b. | t.b.d. |
| 3-28 | 52.2 | 16.6 | 22.0 | n.b. | n.b. |
| 3-31 | 21.0 | 16.1 | 96652.0 | 41.0 | 16.2 |
| 7-09 | 24.1 | 23.2 | n.b. | 38.7 | 177248.4 |
| 7-14 | 20.8 | 19.2 | 16.9 | 43.1 | 20.1 |
| 7-26 | 24.8 | 22.7 | 74.9 | 34.8 | 18.0 |
| 7-30 | 48.7 | 32.0 | n.b. | 55.9 | n.b. |
| 7-37 | 21.6 | 17.8 | 122.9 | 45.1 | 58.5 |

TABLE 8C
Variant Binding

| | | | | | | | SARS-CoV-2 S protein trimer | | |
|---|---|---|---|---|---|---|---|---|---|
| | | | | SARS-CoV-2 S protein trimer | | | (Beta B.1.351 SA variant) | | |
| | SARS-CoV-2 S1 monomer | | | [SPN-C52H9] | | | [SPN-C52Hk] | | |
| | ka (M−1 | | | ka (M−1 | | | ka (M−1 | | |
| Name | s−1) | kd (s−1) | KD (M) | s−1) | kd (s−1) | KD (M) | s−1) | kd (s−1) | KD (M) |
| 5A-3 | 4.62E+04 | 4.90E−04 | 1.06E−08 | 1.04E+05 | 3.12E−05 | 2.99E−10 | 1.05E+05 | 1.00E−05 | 9.53E−11 |
| 5A-63 | 1.14E+05 | 1.94E−03 | 1.70E−08 | 1.52E+05 | 1.00E−05 | 6.59E−11 | 4.78E+05 | 1.00E−05 | 2.09E−11 |
| 3-31 | 3.10E+04 | 1.83E−04 | 5.91E−09 | 7.34E+05 | 1.00E−05 | 1.36E−11 | 1.02E+06 | 1.00E−05 | 9.80E−12 |
| 7-14 | 4.22E+04 | 4.04E−04 | 9.57E−09 | 9.54E+05 | 1.00E−05 | 1.05E−11 | 1.23E+06 | 1.05E−05 | 8.53E−12 |
| 7-26 | 4.21E+04 | 1.53E−04 | 3.63E−09 | 9.11E+05 | 1.00E−05 | 1.10E−11 | 1.24E+06 | 1.00E−05 | 8.08E−12 |
| 7-37 | 3.08E+04 | 5.28E−04 | 1.71E−08 | 8.44E+05 | 1.00E−05 | 1.18E−11 | 1.03E+06 | 2.30E−05 | 2.24E−11 |

TABLE 8D
Variant Binding

| | SARS-CoV-2 S protein trimer | | | SARS-CoV-2 S protein trimer | | | SARS-CoV-2 S protein trimer | | |
|---|---|---|---|---|---|---|---|---|---|
| | (Kappa B.1.617.1 India variant) | | | (Delta B.1.617.2 India variant) | | | (Alpha B.1.1.7 UK variant) | | |
| | [SPN-C52Hr] | | | [SPN-C52He] | | | [SPN-C52H6] | | |
| | ka (M−1 | | | ka (M−1 | | | ka (M−1 | | |
| Name | s−1) | kd (s−1) | KD (M) | s−1) | kd (s−1) | KD (M) | s−1) | kd (s−1) | KD (M) |
| 5A-3 | 1.80E+05 | 4.91E−05 | 2.72E−10 | 1.36E+05 | 4.24E−05 | 3.12E−10 | 1.33E+05 | 1.00E−05 | 7.50E−11 |
| 5A-63 | 2.87E+04 | 2.42E−04 | 8.42E−09 | — | — | — | 4.43E+05 | 1.00E−05 | 2.25E−11 |
| 3-31 | 1.00E+06 | 1.00E−05 | 1.00E−11 | 9.38E+05 | 1.00E−05 | 1.07E−11 | 9.25E+05 | 1.00E−05 | 1.08E−11 |
| 7-14 | 1.20E+06 | 1.00E−05 | 8.30E−12 | 1.01E+06 | 1.00E−05 | 9.94E−12 | 1.16E+06 | 1.00E−05 | 8.62E−12 |
| 7-26 | 1.17E+06 | 1.00E−05 | 8.52E−12 | 9.58E+05 | 1.00E−05 | 1.04E−11 | 1.04E+06 | 1.00E−05 | 9.65E−12 |
| 7-37 | 9.77E+05 | 1.67E−05 | 1.71E−11 | 9.78E+05 | 1.00E−05 | 1.02E−11 | 8.75E+05 | 1.15E−05 | 1.31E−11 |

[0222] Competition ELISAs were performed on the variant antibodies. The protocol is depicted in FIG. 10. Variant antibodies with high potency in order of potency included 6A-3, 6A-63, 6A-63 fc mutant, 5A-1, 16-3, 16-4, Antibody 251-Antibody 201-1 (Lot 19898), Antibody 251-Antibody 201-1 (Lot 19442), Antibody 251-Antibody 202-76_Antibody 201-1_Antibody 201-1 and Acro mAb. SARS-CoV2 strains tested include wildtype, D614G variant, 501.V2 variant and B.1.1.7 variant.

[0223] SARS-CoV-2 variant antibodies were assayed for Vero inhibition using FACS. Briefly, Vero cells stripped with Cell Stripper (˜20 minutes with 90% viability after removal). Cells were plated at 0.1×10⁶ cells per well. Stock solution of the variant antibodies were at 100 nM titrated 1:3. SARS-CoV-2 S protein RBD, SPD-05259 were made up at 1 ug/mL. Variant antibody titrations were mixed 1:1 with 1 ug/mL S protein (50 uL IgG: 50 uL S protein). 100 uL of the mixture were added to cells and then incubated on ice for 1 hour. The cells were washed ix followed by addition of goat anti-mouse secondary made up at 1:200. The cells were then incubated on ice for 1 hour in the dark, washed three times, and the plates were then read. Results are depicted in FIGS. 11A-11D. FIGS. 12A-12D depict the results of an Acro S1-mFc binding competition assay comparing Antibody 181-8 mutant fc, 6A-3_fc_mutant and Acro neutralizing antibody.

[0224] The California variant S1 protein's ability to bind Vero cells was tested. As depicted in FIG. 13A, the CA sl variant binds strongly to Vero cells. FIG. 13B depicts the results of a competition assay of the panel of variants against the CCA S1 spike protein.

[0225] The crossreactors were also tested in a binding competition assay. SARS-CoV-2 antibody variants 3-28, 3-31, 7-9, 7-14, 7-26, 7-30, 7-37 and Acro neutralizing mAb were tested for cross-reactivity with Acro S1, Antibody 178-6 in the D614G SARS-CoV-2 variant, Antibody 178-09 in the B.1.1.7 UK variant, and Antibody 178-10 in the CA_W152C_L452R_D614G variant. Results are depicted in FIGS. 14A-14F.

[0226] The antibody variants were assayed for neutralization of SARS-CoV-2 virus harboring various mutations. Data is seen in FIGS. 15A-15H and FIGS. 24A-24B.

[0227] It took 20 days to deliver 275 anti S1 VHH-Fc variants from DNA synthesis to antibody production (FIG. 25).

### Example 5. Bispecific Antibodies

[0228] Bispecific antibodies were generated similar to seen in FIGS. 16A-16B.

[0229] The bispecific antibodies were then assayed similar to Example 4 for binding using Carterra SPR. The bispecific antibodies were found to bind all variants tested. Data is seen in Table 9.

TABLE 9

| | | | | SARS-CoV-2 S | | |
|---|---|---|---|---|---|---|
| | SARS-CoV-2 S1 | | | protein trimer | | |
| | [S1N-C52H4] | | | [SPN-C52H7] | | |
| | ka (M−1 | | | ka (M−1 | | |
| Variant | s−1) | kd (s−1) | KD (M) | s−1) | kd (s−1) | KD (M) |
| 5A-3 | 4.25E+04 | 4.70E−04 | 1.10E−08 | 5.33E+04 | 1.00E−05 | 1.87E−10 |
| 5A-63 | 7.61E+04 | 2.66E−03 | 3.50E−08 | 1.37E+05 | 1.00E−05 | 7.31E−11 |
| 3-31 | 4.54E+04 | 1.87E−04 | 4.12E−09 | 6.00E+05 | 1.00E−05 | 1.67E−11 |
| 7-14 | 3.74E+04 | 4.64E−04 | 1.24E−08 | 7.03E+05 | 1.00E−05 | 1.42E−11 |
| 7-37 | 3.14E+04 | 6.51E−04 | 2.08E−08 | 6.80E+05 | 1.77E−05 | 2.60E−11 |
| Bispecific | 2.97E+05 | 5.39E−05 | 1.81E−10 | 4.83E+05 | 1.00E−05 | 2.07E−11 |
| Antibody 1 | | | | | | |
| Bispecific | 2.93E+05 | 3.62E−04 | 1.24E−09 | 2.85E+05 | 1.00E−05 | 3.51E−11 |
| Antibody 2 | | | | | | |

| | SARS-CoV-2 S protein trimer | | | SARS-CoV-2 S protein trimer | | |
|---|---|---|---|---|---|---|
| | (B.1.617.2 Delta India variant) | | | (B.1.1.7 Alpha UK variant) | | |
| | [SPN-C52he] | | | [SPN-C52H6] | | |
| | ka (M−1 | | | ka (M−1 | | |
| Variant | s−1) | kd (s−1) | KD (M) | s−1) | kd (s−1) | KD (M) |
| 5A-3 | 1.13E+05 | 7.64E−05 | 6.74E−10 | 7.02E+04 | 1.00E−05 | 1.43E−10 |
| 5A-63 | 2.17E+04 | 2.70E−04 | 1.25E−08 | 1.49E+05 | 1.00E−05 | 6.72E−11 |
| 3-31 | 7.44E+05 | 1.00E−05 | 1.34E−11 | 6.99E+05 | 1.00E−05 | 1.43E−11 |
| 7-14 | 8.18E+05 | 1.00E−05 | 1.22E−11 | 7.82E+05 | 1.00E−05 | 1.28E−11 |
| 7-37 | 8.44E+05 | 1.62E−05 | 1.91E−11 | 7.57E+05 | 1.52E−05 | 2.01E−11 |
| Bispecific | 1.95E+05 | 1.00E−05 | 5.12E−11 | 1.45E+05 | 1.00E−05 | 6.88E−11 |
| Antibody 1 | | | | | | |
| Bispecific | 3.22E+05 | 3.71E−05 | 1.15E−10 | 1.74E+05 | 1.00E−05 | 5.74E−11 |
| Antibody 2 | | | | | | |

| | SARS-CoV-2 S protein trimer | | | SARS-CoV-2 S protein trimer | | | SARS-CoV-2 S protein trimer | | |
|---|---|---|---|---|---|---|---|---|---|
| | (B.1.351 Beta SA variant) | | | (P.1 Gamma Brazil variant) | | | (B.1.617.1 Kappa India variant) | | |
| | [SPN-C52Hk] | | | [SPN-C52Hg] | | | [SPN-C52Hr] | | |
| | ka (M−1 | | | ka (M−1 | | | ka (M−1 | | |
| Variant | s−1) | kd (s−1 ) | KD (M) | s−1) | kd (s−1) | KD (M) | s−1) | kd (s−1) | KD (M) |
| 5A-3 | 1.07E+05 | 1.00E−05 | 9.38E−11 | 9.42E+04 | 1.20E−05 | 1.28E−10 | 1.45E+05 | 8.17E−05 | 5.62E−10 |
| 5A-63 | 2.88E+05 | 1.00E−05 | 3.47E−11 | 2.70E+05 | 1.00E−05 | 3.70E−11 | 3.55E+04 | 2.85E−04 | 8.02E−09 |
| 3-31 | 8.51E+05 | 1.00E−05 | 1.17E−11 | 8.34E+05 | 1.00E−05 | 1.20E−11 | 7.77E+05 | 1.00E−05 | 1.29E−11 |
| 7-14 | 9.31E+05 | 1.60E−05 | 1.71E−11 | 8.77E+05 | 1.62E−05 | 1.85E−11 | 8.35E+05 | 1.00E−05 | 1.20E−11 |
| 7-37 | 9.44E+05 | 2.83E−05 | 3.00E−11 | 9.06E+05 | 2.92E−05 | 3.22E−11 | 8.62E+05 | 2.38E−05 | 2.76E−11 |
| Bispecific | 1.65E+05 | 1.00E−05 | 6.08E−11 | 2.00E+05 | 1.00E−05 | 5.00E−11 | 2.39E+05 | 1.00E−05 | 4.19E−11 |
| Antibody 1 | | | | | | | | | |
| Bispecific | 2.66E+05 | 1.00E−05 | 3.76E−11 | 2.97E+05 | 1.00E−05 | 3.37E−11 | 3.28E+05 | 6.09E−05 | 1.86E−10 |
| Antibody 2 | | | | | | | | | |

[0230] The bispecific antibodies were also assayed in competition assays for alpha. The data is seen in FIGS. 17A-17C and Table 10. As seen in the data, Bispecific Antibody 1 (Bi-Ab1) and Bispecific Antibody 2 (Bi-Ab2) demonstrated good competition with alpha with the bispecific antibodies demonstrating improved competition as compared to the monospecific antibodies.

TABLE 10
IC50 Data Against Alpha

| | | | | 5A-3 |
|---|---|---|---|---|
| | Bi- | Bi- | 3- | (produc- |
| | Ab1_ExpiCHO | Ab2_ExpiCHO | 31_ExpiCHO | tion 2) |
| IC50 | 1.299 | 1.03 | 1.807 | 4.583 |

[0231] The bispecific antibodies were also assayed in competition assays for beta. The data is seen in FIGS. 18A-18C and Table 11. As seen in the data, Bispecific Antibody 1 (Bi-Ab1) and Bispecific Antibody 2 (Bi-Ab2) demonstrated good competition with beta with the bispecific antibodies demonstrating improved competition as compared to the monospecific antibodies.

TABLE 11
IC50 Data Against Beta

| | | | | 5A-3 |
|---|---|---|---|---|
| | Bi- | Bi- | 3- | (produc- |
| | Ab1_ExpiCHO | Ab2_ExpiCHO | 31_ExpiCHO | tion 2) |
| IC50 | 4.617 | 6.126 | 1.242 | 6.008 |

[0232] The bispecific antibodies were also assayed in competition assays for epsilon (L452R). The data is seen in FIGS. 19A-19C and Table 12. As seen in the data, Bispecific Antibody 1 (Bi-Ab1) and Bispecific Antibody 2 (Bi-Ab2) demonstrated good competition with epsilon with the bispecific antibodies demonstrating improved competition as compared to the monospecific antibodies.

TABLE 12
IC50 Data Against Epsilon

| | | | | 5A-3 |
|---|---|---|---|---|
| | Bi- | Bi- | 3- | (produc- |
| | Ab1_ExpiCHO | Ab2_ExpiCHO | 31_ExpiCHO | tion 2) |
| IC50 | 1.861 | 1.557 | 1.619 | 14.23 |

[0233] The bispecific antibodies were assayed in neutralization assays. As seen in FIGS. 20A-20B, Bispecific Antibody 2 (Bi-Ab2) demonstrated good activity against L452R pseudovirus variants of concern (VOCs). Bispecific Antibody 2 (Bi-Ab2) also demonstrated potent live virus neutralization against all tested VOCs (FIGS. 21A-21E).

### Example 6: Exemplary Sequences

TABLE 13
Variable Domain Heavy Chain CDR Sequences

| | SEQ | | SEQ | | SEQ | |
|---|---|---|---|---|---|---|
| | ID | | ID | | ID | |
| Variant | NO | CDRH1 | NO | CDRH2 | NO | CDRH3 |
| 1-1 | 1 | FTFSSYAMN | 652 | SAISGSGVSTYYA | 1303 | CAKGDSGSYYGSSYFDYW |
| 1-2 | 2 | FTFSSYGMS | 653 | SAISGSGGNTYYA | 1304 | CTRVRRGSGVAPYSSSWGRYYFD |
| | | | | | | YW |
| 1-3 | 3 | FRFSSYSMS | 654 | SAISGSGGSSYYA | 1305 | CAKDGSGTIFGVVIAKYYFDYW |
| 1-4 | 4 | FTFSAYAMS | 655 | SAISGSGGSTHYA | 1306 | CASWGPLWSGSPNDAFDIW |
| 1-5 | 5 | FFSSYAMG | 656 | SAISGSGYSTYYA | 1307 | CARVRSYDSTAYDEPLDALDIW |
| 1-6 | 6 | FTFSSFAMS | 657 | SAISGSGVSTYYA | 1308 | CGRDARSSGYNGYDLFDIW |
| 1-7 | 7 | FTFSAYAMS | 658 | SAISGSGGSYYA | 1309 | CAKGPLVGWYFDLW |
| 1-8 | 8 | FTFGSYAMS | 659 | SLISGSGGSTYYA | 1310 | CASWGPLWSGSPNDAFDIW |
| 1-9 | 9 | FTFSAYAMS | 660 | SAISGSGGSTFYA | 1311 | CTRQGDSSGWYDGWFDPW |
| 1-10 | 10 | FIFSSYAMS | 661 | SIISGSGGSTYYA | 1312 | CIATVVSPLDYW |
| 1-11 | 11 | FTFSDYAMS | 662 | STISGSGGSTYYA | 1313 | CARDESSSSLNWFDPW |
| 1-12 | 12 | FTFSSYAMI | 663 | SAISGSAGSTYYA | 1314 | CASPDPLGSVADLDYW |
| 1-13 | 13 | FTFGSYAMS | 664 | SAISGSGGTTYYA | 1315 | CARVWSSSSVFDYW |
| 1-14 | 14 | FTFSRYAMS | 665 | SAISGSGASTYYA | 1316 | CAKDRGGGSYYGTFDYW |
| 1-15 | 15 | STFSSYAMS | 666 | SAISGSGATYYA | 1317 | CTRVRVAGYSSSWYDAFDIW |
| 1-16 | 16 | FTFSSYAMT | 667 | SAISGSGGNTYYA | 1318 | CVKGTIPIFGVIRSAFDYW |
| 1-17 | 17 | FTFSSYVMS | 668 | SSISGSGGSTYYA | 1319 | CARGSGSYSFFDYW |
| 1-18 | 18 | FTFSSYAN | 669 | SAISGSGVSTYYA | 1320 | CATTPGPWIQLWFGGGFDYW |
| 1-19 | 19 | FTFSSYDMS | 670 | SAISGSAGSTTMR | 1321 | CAKDGLVVAGTFDYW |
| 1-20 | 20 | FTFSGYAMS | 671 | SALSGSGGSTYYA | 1322 | CARGALLEWLSRFDNW |
| 1-21 | 21 | FTLSSYAMS | 672 | SAISGSGGTTYYA | 1323 | CARDLGAADLIDYW |
| 1-22 | 22 | FIFSSYAMS | 673 | SAISGSGGTYYA | 1324 | CVRVPAAAGKGVPGIFDIW |
| 1-23 | 23 | FTFSSYAMG | 674 | SAIRGSGGSTYYA | 1325 | CARVRQGLRRTWYYFDYW |
| 1-24 | 24 | STFSSYAMS | 675 | SAIGGSGGSTYYA | 1326 | CAKEYSSSWFDPW |
| 1-25 | 25 | FTFSSYTMS | 676 | SAISVSGGSTYYA | 1327 | CAKREDYDFWSGRGAFDIW |
| 1-26 | 26 | FTFSSYAMY | 677 | SAISGSGGTYYA | 1328 | CAKDIGYSSSWSFDYW |
| 1-27 | 27 | FTFRSYAMS | 678 | SAISGSGRSTYY | 1329 | CARDDYSDYRPFDYW |
| 1-28 | 28 | FTFSSYTMS | 679 | SAISGSGGSIYYA | 1330 | CAHRPSLQWLDWWFDPW |
| 1-29 | 29 | FTFSSQAMS | 680 | SIISGSGGSTYYA | 1331 | CAKDGASGWPNWHFDLW |
| 1-30 | 30 | FTFSSYPMS | 681 | SAISGSGGRTYYA | 1332 | CAKGAAAGPFDYW |
| 1-31 | 31 | FTFSSYAMT | 682 | SAISGGTTYYA | 1333 | CAKEEYYYDSSGPNWFDPW |
| 1-32 | 32 | FTFSSYAMS | 683 | TAISVSGGSTYYA | 1334 | WAPQGGTTVPTGRFDPW |
| 1-33 | 33 | FTFSSYAMS | 684 | SAISGSSGSTYYA | 1335 | CSRGGGPAAGFHGLDVW |
| 1-34 | 34 | FTFSSYAVS | 685 | SAISASGGSTYYA | 1336 | CARAAKRQQLFPRNYFDYW |
| 1-35 | 35 | FTFSSYPMS | 686 | SAIRGSGGSTYYA | 1337 | CALHYGSGRSFDYW |
| 1-36 | 36 | FTFSSYGMS | 687 | SAISGSGGATYYA | 1338 | CARPGGRIVGALWGAFDYW |
| 3-1 | 37 | RTFCRYSMG | 688 | ATWRPANTNYA | 1339 | CAKNWGDAGTTWFEKSGW |
| 3-2 | 38 | NIFSRYIMG | 689 | AAISRTGGSTYYA | 1340 | CAIDPDGEW |
| 3-3 | 39 | RTLAGYTMG | 690 | AEIYPSGNGVYYA | 1341 | CAADVRDSIWRSW |
| 3-4 | | STLSRYSMG | 691 | AAIARRERVYA | 1342 | CARLSCHDYSCYSAFDFW |
| 3-5 | 41 | SIFSSAAMG | 692 | AISWRTGTTYYA | 1343 | CAAAGSMGWNHLRDYDW |
| 3-6 | 42 | TFSGYLMG | 693 | AGIWRSGVSLYYA | 1344 | CAARSGWGAAMRSADFRW |
| 3-7 | 43 | RTFSSYDMG | 694 | AIIKSDGSTYYA | 1345 | CARSPRFSGVVVRPGLDLW |
| 3-8 | 44 | SISSYFMG | 695 | SSIGIAGTPTLYA | 1346 | CAACSDYYCSGVGAVW |
| 3-9 | 45 | PTFSTYAMG | 696 | AAVINGGTTNYA | 1347 | CAKDSWDSSGYSYHYYYYGMDV |
| | | | | | | W |
| 3-10 | 46 | IIGSFRTMG | 697 | GFTGSGRSQYYA | 1348 | CARGDIAVIQVLDYW |
| 3-11 | 47 | GTFASYGMG | 698 | AGIWEDSSAAHYA | 1349 | CAYSGIGTDW |
| 3-12 | 48 | LTFRNYAMG | 699 | AGITSGGTRNYA | 1350 | CAAGWGDSAW |
| 3-13 | 49 | SISTINVMG | 700 | AAISWGGGLTVY | 1351 | CAAFDGYTGSDW |
| | | | | A | | |
| 3-14 | 50 | GTLSSYIG | 701 | ATVRSGSITNYA | 1352 | CAADLTDIWEGIREYDEYAW |
| 3-15 | 51 | RTFRRYPMG | 702 | VAVTWSGGSTYY | 1353 | CAAGLRGRQYSW |
| | | | | A | | |
| 3-16 | 52 | STFSIDVMG | 703 | AAISWSGESTLYA | 1354 | CAAFDGYSGSDW |
| 3-17 | 53 | RTSSSAVMG | 704 | AAINRGGSTIYV | 1355 | CATGPYRSYFARSYLW |
| 3-18 | 54 | GTFSSYRMG | 705 | SAISWNDGGADY | 1356 | CAATQWGSSGWKQARWYDW |
| | | | | A | | |
| 3-19 | 55 | TIFASAMG | 706 | AFSSSGGSTYYA | 1357 | CAKDPIAAADPGDSVSFDYW |
| 3-20 | 56 | FGIDAMG | 707 | ATITEGGATNVGS | 1358 | CALNVWRTSSDW |
| | | | | TS | | |
| 3-21 | 57 | NIIGGNHMG | 708 | GAITSSRSTVYA | 1359 | CAAVTTQTYGYDW |
| 3-22 | 58 | RTFSRYDMG | 709 | GGTRSGSTNYA | 1360 | CARHSDYSGLSNFDYW |
| 3-23 | 59 | QPAPELRGYG | 710 | AAVIGSSGTTYYA | 1361 | CAKAKATVGLRAPFDYW |
| | | MG | | | | |
| 3-24 | 60 | INFSRYGMG | 711 | ASITYLGRTNYA | 1362 | CALRVRPYGQYDW |
| 3-25 | 61 | RTFRRYAMG | 712 | AAINWSGARTYY | 1363 | CAVSKPLNYYTYYDARRYDW |
| | | | | A | | |
| 3-26 | 62 | GTFGHYAMG | 713 | AAVSWSGSSTYY | 1364 | CAVSQPLNYYTYYDARRYDW |
| | | | | A | | |
| 3-27 | 63 | FTLDDYAMG | 714 | AAISWSTGSTYYA | 1365 | CAASQAPITIATMMKPFYDW |
| 3-28 | 64 | FTFRRYDMG | 715 | SAISGGLAYYA | 1366 | CAVDLSGDAVYDW |
| 3-29 | 65 | INFSRNAMG | 716 | ASITHQDRPIYA | 1367 | CALPVGPYGQYDW |
| 3-30 | 66 | RTFTTYGMG | 717 | ASITYLGRTYYA | 1368 | CALRVRPYGQYDW |
| 3-31 | 67 | STFSINAMG | 718 | AGITSSGGYTNYA | 1369 | CAADGVPEYSDYASGPVW |
| 7-1 | 68 | FTFSNYAMR | 719 | SAISGSGGSTYYA | 1370 | CARHTGRYSSGSTGWFHYW |
| 7-2 | 69 | FAFSRHAMS | 720 | SDIGGSGSTTYYA | 1371 | CARTTFDNWFDPW |
| 7-3 | 70 | RTFSINAMG | 721 | AGITRSAVSTITSE | 1372 | CAADGVPEYSDYASGPVW |
| | | | | GTANYA | | |
| 7-4 | 71 | FTFSSYGMN | 722 | SASSGSGGSTYYA | 1373 | ARREYIESGFDSW |
| 7-5 | 72 | RTFSTDAMG | 723 | AAISSGGSTNYA | 1374 | CAATRGRSTRLVLPSLVEW |
| 7-6 | 73 | RIFYPMG | 724 | AAVRWSSTGIYYT | 1375 | CAAALSEVWRGSENLREGYDW |
| | | | | QYA | | |
| 7-7 | 74 | FTFGSYDMG | 725 | TAINWSGARTAYA | 1376 | CAARSVYSYEYNW |
| 7-8 | 75 | STFTINAMG | 726 | SGISHNGGTTNYA | 1377 | CAADGVPEYSDYASGPVW |
| 7-9 | 76 | GTFSSIGMG | 727 | AAISWDGGATAY | 1378 | CAKEDVGKPFDW |
| | | | | A | | |
| 7-10 | 77 | RTYAMG | 728 | AEINWSGSSTYYA | 1379 | CAVDGPFGW |
| 7-11 | 78 | LPFSTKSMG | 729 | AAIHWSGLTSYA | 1380 | CAADRAADFFAQRDEYDW |
| 7-12 | 79 | RTIVPYTMG | 730 | AAISPSAFTEYA | 1381 | CAARRWGYDW |
| 7-13 | 80 | LRLNMHRMG | 731 | AAISGWSGGTNYA | 1382 | CAKIGTLWW |
| 7-14 | 81 | STFSINAMG | 732 | AGISRGGTTNYA | 1383 | CAADGVPEYSDYASGPVW |
| 7-15 | 82 | STLPYHAMG | 733 | ASISRFFGTAYYA | 1384 | CAPTFAAGASEYHW |
| 7-16 | 83 | FTFTSYAIS | 734 | SAISGSGGSTDYA | 1385 | CARGAYGSGTYDYW |
| 7-17 | 84 | FSLDYYGMG | 735 | AAITSGGTPHYA | 1386 | CASAYNPGIGYDW |
| 7-18 | 85 | LTDRRYTMG | 736 | ASITLGGSTAYA | 1387 | CAKEDVGKPFDW |
| 7-19 | 86 | RTFRRYTMG | 737 | ASITSSGVNAYA | 1388 | CAKEDVGKPFDW |
| 7-20 | 87 | PTFSIYAMG | 738 | AGISWNGGSTNYA | 1389 | CALRRRFGGQEW |
| 7-21 | 88 | RTISRYTMG | 739 | ASITSGGSTAYA | 1390 | CAKEDVGKPFDW |
| 7-22 | 89 | RTITRYTMG | 740 | ASITSGGSTAYA | 1391 | CAKQDVGKPFDW |
| 7-23 | 90 | FTFENHAMG | 741 | AEIYPSGSTIYA | 1392 | CAARILSRNW |
| 7-24 | 91 | FTFSRHAMN | 742 | STITGSGGSTNYA | 1393 | CAREVGLYYYGSGS |
| | | | | | | SSRRLLGRIDYYFDYW |
| 7-25 | 92 | FTFDDYSMG | 743 | ASIEWDGSTYYA | 1394 | CAAFDGYTGSDW |
| 7-26 | 93 | STFSINAMG | 744 | AGITSSGGYTNYA | 1395 | CAADGVPEYSDYASGPVW |
| 7-27 | 94 | QTFNMG | 745 | AEINWSGSSTYYA | 1396 | CAVDGPFGW |
| 7-28 | 95 | NTFSDNPMG | 746 | AILAWDSGSTYYA | 1397 | CTTDYSKLAITKLSYW |
| 7-29 | 96 | RTHSIYPMG | 747 | ASITSYGDTNYA | 1398 | CAARRWIPPGPIW |
| 7-30 | 97 | RTFSMHAMG | 748 | ASISSQGRTNYA | 1399 | CAAEVRNGSDYLPIDW |
| 7-31 | 98 | FTFSNYSMG | 749 | AAIHWNGDSTAY | 1400 | CAAQTEDSAQYIW |
| | | | | A | | |
| 7-32 | 99 | STFSVNAMG | 750 | AGVTRGGYTNYA | 1401 | CAADGVPEYSDYASGPVW |
| 7-33 | 100 | SIGSINAMG | 751 | AGISNGGTTNYA | 1402 | CAADGVPEYSDYASGPVW |
| 7-34 | 101 | RTFGSYDMG | 752 | AFIHRSGGSTYYA | 1403 | CATFPAIVTDSDYDLGNDW |
| 7-35 | 102 | GTFGHYAMG | 753 | AAVSWSGSSTYY | 1404 | CAVSQPLNYYTYYDARRYDW |
| | | | | A | | |
| 7-36 | 103 | FGFGSYDMG | 754 | TAINWSGARAYY | 1405 | CAARSVYSYDYNW |
| | | | | A | | |
| 7-37 | 104 | STLSINAMG | 755 | AGITRSGSVTNYA | 1406 | CAADGVPEYSDYASGPVW |
| 7-38 | 105 | RPFSEYTMG | 756 | SSIHWGGRGTNYA | 1407 | CAAELHSSDYTSPGAYAW |
| 7-39 | 106 | RTFSNYPMG | 757 | AAITWSGDSTNYA | 1408 | CALPSNIITTDYLRVYW |
| 7-40 | 107 | RTFRRYTMG | 758 | ASITKFGSTNYA | 1409 | CAKEDVGKPFDW |
| 7-41 | 108 | RTFSTYVMG | 759 | ASISSRGITHYA | 1410 | CAKEDVGKPFDW |
| 7-42 | 109 | FTLDYYGMG | 760 | AAITSGGTPHYG | 1411 | CASAYNPGIGYDW |
| 7-43 | 110 | FTFGHYAMG | 761 | AAVSWSGSTTYY | 1412 | CAVSHPLNYYTYYDARRYDW |
| | | | | A | | |
| 7-44 | 111 | FTFEDYAMG | 762 | AAITRGSNTTDYA | 1413 | CAARRWMGGSYFDPGNYDW |
| 7-45 | 112 | RTLSRYTMG | 763 | ASITSGGSTNYA | 1414 | CAKEDVGKPFDW |
| 8-1 | 113 | RTFASYAMG | 764 | GAISRSGDSTYYA | 1415 | CARAPFYCTTTKCQDNYYYMDV |
| | | | | | | W |
| 8-2 | 114 | GTYHAMG | 765 | AGITSDDRTNYA | 1416 | CARERRYYDSSGYPYYFDYW |
| 8-3 | 115 | TTLDYYAMG | 766 | AAISWSGGSTAYA | 1417 | CAREDYYDSSGYSW |
| 8-4 | 116 | GTLSRSRMG | 767 | AFIGSDTLYA | 1418 | CANLAYYDSSGYYDYW |
| 8-5 | 117 | GTFSFYNMG | 768 | AFISGNGGTSYA | 1419 | CAVVAMRMVTTEGPDVLDVW |
| 8-6 | 118 | FTFDYYAMG | 769 | SAIDSEGRTSYA | 1420 | CARWGPFDIW |
| 8-7 | 119 | FPFSIWPMG | 770 | AAVRWSSTGIYYT | 1421 | CTRSEYSSGWYDYW |
| | | | | QYA | | |
| 8-8 | 120 | FAESSSMG | 771 | AAISWSGDITIYA | 1422 | CARGAPYFDHGSKSYRLFYFDYW |
| 8-9 | 121 | FTFGTTTMG | 772 | AAISWSTGIAHYA | 1423 | CARGGPNYYASGRYPWFDPW |
| 8-10 | 122 | FIGNYHAMG | 773 | AAVTWSGGTTNY | 1424 | CAREGYYYDSSGYPYYFDYW |
| | | | | A | | |
| 4A-1 | 123 | RTFSDDTMG | 774 | GGISWSGGNTYYA | 1425 | CATDPPLFW |
| 4A-2 | 124 | RTFGDYIMG | 775 | AAINWSAGYTAY | 1426 | CARASPNTGWHFDRW |
| | | | | A | | |
| 4A-3 | 125 | RTFSDDAMG | 776 | AAINWSGGTTRYA | 1427 | CATDPPLFW |
| 4A-4 | 126 | RTFGDYIMG | 777 | AAINWIAGYTADA | 1428 | CAEPSPNTGWHFDHW |
| 4A-5 | 127 | RTFGDDTMG | 778 | AAINWSGGNTYY | 1429 | CATDPPLFW |
| | | | | A | | |
| 4A-6 | 128 | RTFGDDTMG | 779 | AAINWTGGYTPY | 1430 | CATDPPLFW |
| | | | | A | | |
| 4A-7 | 129 | RTFGDYIMG | 780 | AAINWSGGYTAY | 1431 | CATASPNTGWHFDHW |
| | | | | A | | |
| 4A-8 | 130 | RTFGDYIMG | 781 | GGINWSGGYTYY | 1432 | CATDPPLFW |
| | | | | A | | |
| 4A-9 | 131 | RTFGDYIMG | 782 | AAINWSGGYTHY | 1433 | CATDPPLFW |
| | | | | A | | |
| 4A-10 | 132 | RTFSDDTMG | 783 | AAIHWSGSSTRYA | 1434 | CATDPPLFW |
| 4A-11 | 133 | RTFGDYAMG | 784 | APINWSGGSTYYA | 1435 | CATDPPLFW |
| 4A-12 | 134 | RTFGDDTMG | 785 | AAINWSGGNTPYA | 1436 | CATDPPLFW |
| 4A-13 | 135 | RTFGDDTMG | 786 | AAINWSGDNTHY | 1437 | CATDPPLFW |
| | | | | A | | |
| 4A-14 | 136 | RTFSDDTMG | 787 | AAINWSGGTTRYA | 1438 | CATDPPLFW |
| 4A-15 | 137 | RTFSDDTMG | 788 | AAINWSGDSTYYA | 1439 | CATDPPLFW |
| 4A-16 | 138 | RTFSDYTMG | 789 | AAINWSGGYTYY | 1440 | CATDPPLFW |
| | | | | A | | |
| 4A-17 | 139 | RTFGDDTMG | 790 | AAINWSGGNTDY | 1441 | CATDPPLFW |
| | | | | A | | |
| 4A-18 | 140 | RTFGDYIMG | 791 | AAINWSGGYTPYA | 1442 | CATDPPLFW |
| 4A-19 | 141 | RTFSDDTMG | 792 | AAINWSGGSTYYA | 1443 | CATDPPLFW |
| 4A-20 | 142 | RTFGDDIMG | 793 | AAIHWSAGYTRY | 1444 | CATDPPLFWGHVDLW |
| | | | | A | | |
| 4A-21 | 143 | RTFSDDTMG | 794 | AGMTWSGSSTFY | 1445 | CATDPPLFW |
| | | | | A | | |
| 4A-22 | 144 | RTFGDYIMG | 795 | AAINWSGDNTHY | 1446 | CATDPPLFW |
| | | | | A | | |
| 4A-23 | 145 | RTFSDDAMG | 796 | AGISWNGGSIYYA | 1447 | CATDPPLFW |
| 4A-24 | 146 | RTFSDYTMG | 797 | AAINWSGGTTYY | 1448 | CATDPPLFW |
| | | | | A | | |
| 4A-25 | 147 | GTFSRYAMG | 798 | SAVDSGGSTYYA | 1449 | CAASPSLRSAWQW |
| 4A-26 | 148 | RTFSDDTMG | 799 | AAVNWSGGSTYY | 1450 | CATDPPLFW |
| | | | | A | | |
| 4A-27 | 149 | RTFGDYIMG | 800 | AAINWSAGYTAY | 1451 | CARATPNTGWHFDHW |
| | | | | A | | |
| 4A-28 | 150 | RTFGDDTMG | 801 | AAINWNGGNTHY | 1452 | CATDPPLFW |
| | | | | A | | |
| 4A-29 | 151 | RTFGDDTMG | 802 | AAINWSGGYTYY | 1453 | CATDPPLFW |
| | | | | A | | |
| 4A-30 | 152 | RTFGDYTMG | 803 | AAINWTGGYTYY | 1454 | CATDPPLFW |
| | | | | A | | |
| 4A-31 | 153 | RTFGDYIMG | 804 | AAINWSAGYTAY | 1455 | CATASPNTGWHFDHW |
| | | | | A | | |
| 4A-32 | 154 | FTFDDYEMG | 805 | AAISWRGGTTYYA | 1456 | CAADRRGLASTRAGDYDW |
| 4A-33 | 155 | FTFSRHDMG | 806 | AGINWESGSTNYA | 1457 | CAADRGVYGGRWYRTSQYTW |
| 4A-34 | 156 | RTFGDYIMG | 807 | AAINWSADYTAY | 1458 | CATDPPLFCWHFDHW |
| | | | | A | | |
| 4A-35 | 157 | QLANFASY | 808 | AAITRSGSSTVYA | 1459 | CATTMNPNPRW |
| | | AMG | | | | |
| 4A-36 | 158 | RTFGDYIMG | 809 | AAINWSAGYTAY | 1460 | CATAPPLFCWHFDHW |
| | | | | A | | |
| 4A-37 | 159 | RTFGDYGMG | 810 | ATINWSGALTHYA | 1461 | CATLPFYDFWSGYYTGYYYMDV |
| | | | | | | W |
| 4A-38 | 160 | RTFSDDTMG | 811 | AAITWSGGRTRYA | 1462 | CATDRPLFW |
| 4A-39 | 161 | RTFSNAAMG | 812 | ARILWTGASRNYA | 1463 | CATTENPNPRW |
| 4A-40 | 162 | RTFSDDTMG | 813 | AGINWSGNGVYY | 1464 | CATDPPLFW |
| | | | | A | | |
| 4A-41 | 163 | RTFGDYIMG | 814 | AAINWSGGTTPYA | 1465 | CATDPPLFCCHVDLW |
| 4A-42 | 164 | RTFGDDTMG | 815 | AAINWSGGYTPYA | 1466 | CATDPPLFWGHVDLW |
| 4A-43 | 165 | RTFSDDTMG | 816 | AAINWSGGSTDYA | 1467 | CATDPPLFW |
| 4A-44 | 166 | RTFGDYIMG | 817 | AAINWSAGYTAY | 1468 | CATARPNTGWHFDHW |
| | | | | A | | |
| 4A-45 | 167 | RTFSDDAMG | 818 | AAINWSGGSTRYA | 1469 | CATDPPLFW |
| 4A-46 | 168 | RTFGDYIMG | 819 | AAINWSAGYTPYA | 1470 | CATDPPLFWGHVDLW |
| 4A-47 | 169 | FTFGDYVMG | 820 | AAINWNAGYTAY | 1471 | CAKASPNTGWHFDHW |
| | | | | A | | |
| 4A-48 | 170 | RTFSDDAMG | 821 | GRINWSGGNTYY | 1472 | CATDPPLFW |
| | | | | A | | |
| 4A-49 | 171 | RTFGDYIMG | 822 | AAINWSAGYTAY | 1473 | CARASPNTGWHFDHW |
| | | | | A | | |
| 4A-50 | 172 | GTFSNSGMG | 823 | AVVNWSGRRTYY | 1474 | CAVPWMDYNRRDW |
| | | | | A | | |
| 2A-1 | 173 | FTFSNYATD | 824 | SIISGSGGATYYA | 1475 | CAKGGYCSSDTCWWEYWLDPW |
| 2A-2 | 174 | FTFSRHAMN | 825 | SGISGSGDETYYA | 1476 | CARDLPASYYDSSGYYWHNGMD |
| | | | | | | VW |
| 2A-3 | 175 | FTFSDFAMA | 826 | SAISGSGDITYYA | 1477 | CAREADCLPSPWYLDLW |
| 2A-4 | 176 | FTFSDFAMA | 827 | SAITGTGDITYYA | 1478 | CAREADGLHSPW |
| 2A-5 | 177 | FTFSDFAMA | 828 | SAISGSGDITYYA | 1479 | CAREADGLHSPWHFDLW |
| 2A-6 | 178 | FTFSDFAMA | 829 | SAISGSGDITYYA | 1480 | CAREADGLHSPWHFDLW |
| 2A-7 | 179 | FTFSDFAMA | 830 | SAITGSGDITYYA | 1481 | CAREADGLHSPWHFDLW |
| 2A-8 | 180 | FTFSDFAMA | 831 | SAISGSGDITYYA | 1482 | CAREADGLHSPWHFDLW |
| 2A-9 | 181 | FTFPRYAMS | 832 | STISGSGSTTYYA | 1483 | CARLIDAFDIW |
| 2A-10 | 182 | FTFSAFAMG | 833 | SAITASGDITYYA | 1484 | CARQSDGLPSPWHFDLG |
| 2A-11 | 183 | FTFSNYPMN | 834 | STISGSGGNTFYA | 1485 | CVRHDEYSFDYW |
| 2A-12 | 184 | FTFSDYPMN | 835 | STISGSGGITFYA | 1486 | CVRHDEYSFDYW |
| 2A-13 | 185 | FTFSDYPMN | 836 | SAISGSGDNTYYA | 1487 | CVRHDEYSFDYW |
| 2A-14 | 186 | FTFSDYPMN | 837 | SAITGSGDITYYA | 1488 | CVRHDEYSFDYW |
| 2A-15 | 187 | FTFSDYPMN | 838 | STISGSGGITFYA | 1489 | CVRHDEYSFDYW |
| 3A-1 | 188 | FMFGNYAMS | 839 | AAISGSGGSTYYA | 1490 | CAKDRGYSSSWYGGFDYW |
| 3A-2 | 189 | FTFRSHAMN | 840 | SAISGSGGSTNYA | 1491 | CARGLKFLEWLPSAFDIW |
| 3A-3 | 190 | FTFRNYAMA | 841 | SGISGSGGTTYYG | 1492 | CARGTRFLEWSLPLDVW |
| 3A-4 | 191 | FTFRNHAMA | 842 | SGISGSGGTTYYG | 1493 | CARGTRFLQWSLPLDVW |
| 3A-5 | 192 | FTITNYAMS | 843 | SGISGSGAGTYYA | 1494 | CARHAWWKGAGFFDHW |
| 3A-6 | 193 | FTIPNYAMS | 844 | SGISGAGASTYYA | 1495 | CARHTWWKGAGFFDHW |
| 3A-7 | 194 | FTIPNYAMS | 845 | SGISGSGASTYYA | 1496 | CARHTWWKGAGFFDHW |
| 3A-8 | 195 | FTITNYAMS | 846 | SGISGSGASTYYA | 1497 | CARHTWWKGAGFFDHW |
| 3A-9 | 196 | FTITNYAMS | 847 | SGISGSGAGTYYA | 1498 | CARHTWWKGAGFFDHW |
| 3A-10 | 197 | FTFRSHAMS | 848 | SSISGGGASTYYA | 1499 | CARVKYLTTSSGWPRPYFDNW |
| 3A-11 | 198 | FTIRNYAMS | 849 | SSISGGGASTYYA | 1500 | CARVKYLTTSSGWPRPYFDNW |
| 3A-12 | 199 | FTFRSHAMS | 850 | SSISGGGASTYYA | 1501 | CARVKYLTTSSGWPRPYFDNW |
| 3A-13 | 200 | FTFRSHAMS | 851 | SSISGGGASTYYA | 1502 | CARVKYLTTSSGWPRPYFDNW |
| 3A-14 | 201 | FTFRSYAMS | 852 | SSISGGGASTYYA | 1503 | CARVKYLTTSSGWPRPYFDNW |
| 3A-15 | 202 | FTFSAYSMS | 853 | SAISGSGGSRYYA | 1504 | CGRSKWPQANGAFDIW |
| 2A-1 | 203 | FTFSNYATD | 854 | SIISGSGGATYYA | 1505 | CAKGGYCSSDTCWWEYWLDPW |
| 2A-10 | 204 | FTFSAFAMG | 855 | SAITASGDITYYA | 1506 | CARQSDGLPSPWHFDLG |
| 2A-5 | 205 | FTFSDFAMA | 856 | SAISGSGDITYYA | 1507 | CAREADGLHSPWHFDLW |
| 2A-2 | 206 | FTFSRHAMN | 857 | SGISGSGDETYYA | 1508 | CARDLPASYYDSSGYYWHNGMD |
| | | | | | | VW |
| 2A-4 | 207 | FTFSDFAMA | 858 | SAISGSGDITYYA | 1509 | CAREADGLHSPWHFDLW |
| 2A-6 | 208 | FTFSNYPMN | 859 | STISGSGGNTFYA | 1510 | CVRHDEYSFDYW |
| 2A-11 | 209 | FTFSDFAMA | 860 | SAITGSGDITYYA | 1511 | CAREADGLHSPWHFDLW |
| 2A-12 | 210 | FTFSDYPMN | 861 | STISGSGGITFYA | 1512 | CVRHDEYSFDYW |
| 2A-13 | 211 | FTFSDYPMN | 862 | SAISGSGDNTYYA | 1513 | CVRHDEYSFDYW |
| 2A-14 | 212 | FTFSDFAMA | 863 | SAITGTGDITYYA | 1514 | CAREADGLHSPW |
| 2A-7 | 213 | FTFSDYPMN | 864 | SAITGSGDITYYA | 1515 | CVRHDEYSFDYW |
| 2A-8 | 214 | FTFSDFAMA | 865 | SAISGSGDITYYA | 1516 | CAREADGLHSPWHFDLW |
| 2A-15 | 215 | FTFSDFAMA | 866 | SAISGSGDITYYA | 1517 | CAREADGLHSPWHFDLW |
| 2A-9 | 216 | FTFPRYAMS | 867 | STISGSGSTTYYA | 1518 | CARLIDAFDIW |
| 2A-16 | 217 | FTFSSYAMS | 868 | SVISGSGGSTYYA | 1519 | CAREGYRDYLWYFDLW |
| 2A-17 | 218 | FTFSNYAMS | 869 | SAISGSAGSTYYA | 1520 | CARVRQGLRRTWYYFDYW |
| 2A-18 | 219 | FTFSSYAMY | 870 | SAISGSAGSTYYA | 1521 | CARDTNDFWSGYSIFDPW |
| 2A-19 | 220 | FTFSSYTMS | 871 | SVISGSGGSTYYA | 1522 | CAREGYRDYLWYFDLW |
| 2A-2 | 221 | FTFSSYDMS | 872 | SVISGSGGSTYYA | 1523 | CAKGPLVGWYFDLW |
| 2A-21 | 222 | FTFPRYAMS | 873 | STISGSGSTTYYA | 1524 | CARLIDAFDIW |
| 2A-22 | 223 | FTFTTYALS | 874 | SGISGSGDETYYA | 1525 | CTTGDDFWSGGNWFDPW |
| 2A-23 | 224 | FTFSRHAMN | 875 | SGITGSGDETYYA | 1526 | CARDLPASYYDSSGYYWHNGMD |
| | | | | | | VW |
| 2A-24 | 225 | FVFSSYAMS | 876 | SAISGSGGSSYYA | 1527 | CARVGGGYWYGIDVW |
| 2A-25 | 226 | FTLSSYVMS | 877 | SGISGGGASTYYA | 1528 | CARGYSRNWYPSWFDPW |
| 2A-26 | 227 | FTFSTYAMS | 878 | SSIGGSGSTTYYA | 1529 | CAGGWYLDYW |
| 2A-27 | 228 | FTYSNYAMT | 879 | SAISGSSGSTYYA | 1530 | CASLCIVDPFDIW |
| 2A-28 | 229 | FTFSNYPMN | 880 | STISGSGGNTFYA | 1531 | CVRHDEYSFDYW |
| 3A-10 | 230 | FTFRSHAMS | 881 | SSISGGGASTYYA | 1532 | CARVKYLTTSSGWPRPYFDNW |
| 3A-4 | 231 | FTFSAYSMS | 882 | SAISGSGGSRYYA | 1533 | CGRSKWPQANGAFDIW |
| 3A-7 | 232 | FMFGNYAMS | 883 | AAISGSGGSTYYA | 1534 | CAKDRGYSSSWYGGFDYW |
| 3A-1 | 233 | FTFRNHAMA | 884 | SGISGSGGTTYYG | 1535 | CARGTRFLQWSLPLDVW |
| 3A-5 | 234 | FTIPNYAMS | 885 | SGISGAGASTYYA | 1536 | CARHTWWKGAGFFDHW |
| 3A-6 | 235 | FTFRNYAMA | 886 | SGISGSGGTTYYG | 1537 | CARGTRFLEWSLPLDVW |
| 3A-15 | 236 | FTIRNYAMS | 887 | SSISGGGASTYYA | 1538 | CARVKYLTTSSGWPRPYFDNW |
| 3A-3 | 237 | FTIPNYAMS | 888 | SGISGSGASTYYA | 1539 | CARHTWWKGAGFFDHW |
| 3A-11 | 238 | FTITNYAMS | 889 | SGISGSGAGTYYA | 1540 | CARHAWWKGAGFFDHW |
| 3A-8 | 239 | FTFRSHAMS | 890 | SSISGGGASTYYA | 1541 | CARVKYLTTSSGWPRPYFDNW |
| 3A-2 | 240 | FTITNYAMS | 891 | SGISGSGASTYYA | 1542 | CARHTWWKGAGFFDHW |
| 3A-12 | 241 | FTFRSHAMN | 892 | SAISGSGGSTNYA | 1543 | CARGLKFLEWLPSAFDIW |
| 3A-14 | 242 | FTFRSHAMS | 893 | SSISGGGASTYYA | 1544 | CARVKYLTTSSGWPRPYFDNW |
| 3A-9 | 243 | FTFRSYAMS | 894 | SSISGGGASTYYA | 1545 | CARVKYLTTSSGWPRPYFDNW |
| 3A-13 | 244 | FTITNYAMS | 895 | SGISGSGAGTYYA | 1546 | CARHTWWKGAGFFDHW |
| 3A-16 | 245 | FTFTNFAMS | 896 | SAISGRGGGTYYA | 1547 | CARDAHGYYYDSSGYDDW |
| 3A-17 | 246 | FTFRSYPMS | 897 | STISGSGGITYYA | 1548 | CAKGVYGSTVTTCHW |
| 3A-18 | 247 | FTLTSYAMS | 898 | SAISGSGVDTYYA | 1549 | CARPTNWGFDYW |
| 3A-19 | 248 | FTFINYAMS | 899 | STISTSGGNTYYA | 1550 | CARADSNWASSAYW |
| 3A-2 | 249 | FPFSTYAMS | 900 | SGISVSGGFTYYA | 1551 | CARDPYSYGYYYYYGMDVW |
| 3A-21 | 250 | FTFSTYAMG | 901 | SGISGGGVSTYYA | 1552 | CARARNWGPSDYW |
| 3A-22 | 251 | FIFSDYAMT | 902 | SAISGSAFYA | 1553 | CARDATYSSSWYNWFDPW |
| 3A-23 | 252 | FTFSDYAMT | 903 | SDISGSGGSTYYA | 1554 | CARGTVTSFDFW |
| 3A-24 | 253 | FTFSIYAMG | 904 | SFISGSGGSTYYA | 1555 | CAKDYHSASWFSAAADYW |
| 3A-25 | 254 | FTFASYAMT | 905 | SAISESGGSTYYA | 1556 | CAREGQEYSSGSSYFDYW |
| 3A-26 | 255 | FTFSEYAMS | 906 | SAITGSGGSTYYG | 1557 | CARGSQTPYCGGDCPETFDYW |
| 3A-27 | 256 | FTFDDYAMS | 907 | SGISGGGTSTYYA | 1558 | CARDLYSSGWYGFDYW |
| 3A-28 | 257 | FTFNNYAMN | 908 | SAISGSVGSTYYA | 1559 | CARDNYDFWSGYYTNWFDPW |
| 3A-29 | 258 | FTFTNHAMS | 909 | SAISGSGSNIYYA | 1560 | CARDSLSVTMGRGVVTYYYYGM |
| | | | | | | DFW |
| 4A-51 | 259 | PGTAIMG | 910 | ARISTSGGSTKYA | 1561 | CARTTVTTPPLIW |
| 4A-52 | 260 | RSFSNSVMG | 911 | ARITWNGGSTYYA | 1562 | CATTENPNPRW |
| 4A-53 | 261 | RTFGDDTMG | 912 | AAVSWSGSGVYY | 1563 | CATDPPLFW |
| | | | | A | | |
| 4A-54 | 262 | RTFSDARMG | 913 | GAVSWSGGTTVY | 1564 | CATTEDPYPRW |
| | | | | A | | |
| 4A-49 | 263 | RTFGDYIMG | 914 | AAINWSAGYTAY | 1565 | CARASPNTGWHFDHW |
| | | | | A | | |
| 4A-55 | 264 | SGLSINAMG | 915 | AAISWSGGSTYTA | 1566 | CAAYQAGWGDW |
| | | | | YA | | |
| 4A-39 | 265 | RTFSNAAMG | 916 | ARILWTGASRNYA | 1567 | CATTENPNPRW |
| 4A-56 | 266 | FSLDYYGMG | 917 | AAISWNGDFTAYA | 1568 | CAKRANPTGAYFDYW |
| 4A-33 | 267 | FTFSRHDMG | 918 | AGINWESGSTNYA | 1569 | CAADRGVYGGRWYRTSQYTW |
| 4A-57 | 268 | LTFRNYAMG | 919 | AAIGSGGYTDYA | 1570 | CAVKPGWVARDPSQYNW |
| 4A-25 | 269 | GTFSRYAMG | 920 | SAVDSGGSTYYA | 1571 | CAASPSLRSAWQW |
| 4A-58 | 270 | FTLDYYDMG | 921 | AAVTWSGGSTYY | 1572 | CAADRRGLASTRAADYDW |
| | | | | A | | |
| 4A-59 | 271 | RTFGDYIMG | 922 | AAINWSAGYTPYA | 1573 | CATAPPLFCWHFDLW |
| 4A-6 | 272 | RTFGDDIMG | 923 | AAIHWSAGYTRY | 1574 | CATDPPLFWGHVDLW |
| | | | | A | | |
| 4A-61 | 273 | RTFGDYIMG | 924 | AAINWSADYTPYA | 1575 | CATAPPNTGWHFDHW |
| 4A-3 | 274 | RTFGDYIMG | 925 | AAINWSAGYTAY | 1576 | CATATPNTGWHFDHW |
| | | | | A | | |
| 4A-62 | 275 | RTFSDDTMG | 926 | AAINWSGGSTDYA | 1577 | CATDPPLFW |
| 4A-43 | 276 | RTFGDDTMG | 927 | AGINWSGGNTYY | 1578 | CATDPPLFW |
| | | | | A | | |
| 4A-5 | 277 | RTFGDYIMG | 928 | AAINWTGGYTSY | 1579 | CATDPPLFW |
| | | | | A | | |
| 4A-42 | 278 | RTFGDDTMG | 929 | AAINWSGGNTYY | 1580 | CATDPPLFW |
| | | | | A | | |
| 4A-63 | 279 | RTFSDYTMG | 930 | AAINWSGGYTYY | 1581 | CATDPPLFW |
| | | | | A | | |
| 4A-6 | 280 | RTFGDYGMG | 931 | ATINWSGALTHYA | 1582 | CATLPFYDFWSGYYTGYYYMDV |
| | | | | | | W |
| 4A-40 | 281 | RTFSDDTMG | 932 | AGVTWSGSSTFYA | 1583 | CATDPPLFW |
| 4A-21 | 282 | RTFSDDIMG | 933 | AAISWSGGNTHYA | 1584 | CATDPPLFW |
| 4A-64 | 283 | RTFGDYIMG | 934 | AAINWSAGYTAY | 1585 | CATASPNTGWHFDHW |
| | | | | A | | |
| 4A-47 | 284 | FTFDDDYVMG | 935 | AAVSGSGDDTYY | 1586 | CAADRRGLASTRAADYDW |
| | | | | A | | |
| 4A-65 | 285 | RTFGDYIMG | 936 | AAINWSAGYTAY | 1587 | CATEPPLSCWHFDLW |
| | | | | A | | |
| 4A-18 | 286 | RTFGDYIMG | 937 | AAINWSGGYTPYA | 1588 | CATAPPNTGWHFDHW |
| 4A-66 | 287 | RTFGDDTMG | 938 | AAINWSAGYTPYA | 1589 | CATDPPLFCCHFDLW |
| 4A-36 | 288 | RTFSDDTMG | 939 | AAISWSGGTTRYA | 1590 | CATDPPLFW |
| 4A-67 | 289 | RTFSDDTMG | 940 | AAINWSGDSTYYA | 1591 | CATDPPLFW |
| 4A-16 | 290 | RTFSDDTMG | 941 | AAINWSGGTTRYA | 1592 | CATDPPLFW |
| 4A-11 | 291 | RTFSDDAMG | 942 | AAIHWSGSSTRYA | 1593 | CATDPPLFW |
| 4A-68 | 292 | RTFSDDTMG | 943 | GTINWSGGSTYYA | 1594 | CATDPPLFW |
| 4A-34 | 293 | RTFGDYIMG | 944 | AAINWSGGYTPYA | 1595 | CATDPPLFW |
| 4A-28 | 294 | RTFGDDTMG | 945 | AAINWNGGNTHY | 1596 | CATDPPLFW |
| | | | | A | | |
| 4A-69 | 295 | RTFSDDAMG | 946 | AAINWSGGTTRYA | 1597 | CATDPPLFW |
| 4A-7 | 296 | RTFGDYIMG | 947 | AAINWSAGYTPYA | 1598 | CATDPPLFWGHVDLW |
| 4A-71 | 297 | RTFSDDTMG | 948 | ASINWSGGSTYYA | 1599 | CATDPPLFW |
| 4A-23 | 298 | RTFSDDAMG | 949 | AGISWNGGSIYYA | 1600 | CATDPPLFW |
| 4A-9 | 299 | FTFDDYEMG | 950 | AAISWRGGTTYYA | 1601 | CAADRRGLASTRAGDYDW |
| 4A-72 | 300 | RTFGDDTMG | 951 | AAINWSGGYTPYA | 1602 | CATDPPLFWGHVDLW |
| 4A-73 | 301 | RTFSDDAMG | 952 | AAINWSGGSTRYA | 1603 | CATDPPLFW |
| 4A-29 | 302 | VTLDDYAMG | 953 | AVINWSGGSTDYA | 1604 | CARGGGWVPSSTSESLNWYFDRW |
| 4A-41 | 303 | RTFGDYIMG | 954 | AAINWSGGTTPYA | 1605 | CATDPPLFCCHVDLW |
| 4A-74 | 304 | LTFSDDTMG | 955 | AAVSWSGGNTYY | 1606 | CATDPPLFW |
| | | | | A | | |
| 4A-75 | 305 | RTFGDDTMG | 956 | AAINWTGGYTPY | 1607 | CATDPPLFW |
| | | | | A | | |
| 4A-31 | 306 | RTFGDYIMG | 957 | ATINWTAGYTYY | 1608 | CATDPPLFCWHFDHW |
| | | | | A | | |
| 4A-32 | 307 | RTFGDDTMG | 958 | AAINWSGGNTDY | 1609 | CATDPPLFW |
| | | | | A | | |
| 4A-15 | 308 | RTFGDYTMG | 959 | AAINWSGGNTYY | 1610 | CATDPPLFW |
| | | | | A | | |
| 4A-14 | 309 | RTFSDDTMG | 960 | AGINWSGNGVYY | 1611 | CATDPPLFW |
| | | | | A | | |
| 4A-76 | 310 | RTFGDYAMG | 961 | APINWSGGSTYYA | 1612 | CATDPPLFW |
| 4A-50 | 311 | GTFSNSGMG | 962 | AVVNWSGRRTYY | 1613 | CAVPWMDYNRRDW |
| | | | | A | | |
| 4A-17 | 312 | QLANFASYAM | 963 | AAITRSGSSTVYA | 1614 | CATTMNPNPRW |
| | | G | | | | |
| 4A-37 | 313 | RTFSDDIMG | 964 | AAINWTGGSTYY | 1615 | CATDPPLFW |
| | | | | A | | |
| 4A-44 | 314 | RTFGDYIMG | 965 | AAINWSAGYTAY | 1616 | CATARPNTGWHFDHW |
| | | | | A | | |
| 4A-77 | 315 | RTFSDDTMG | 966 | GSINWSGGSTYYA | 1617 | CATDPPLFW |
| 4A-78 | 316 | RTFSDDTMG | 967 | AGMTWSGSSTFY | 1618 | CATDPPLFW |
| | | | | A | | |
| 4A-79 | 317 | RTFGDYIMG | 968 | AAINWSGDYTDY | 1619 | CATDPPLFW |
| | | | | A | | |
| 4A-8 | 318 | RTFGDYIMG | 969 | GGINWSGGYTYY | 1620 | CATDPPLFW |
| | | | | A | | |
| 4A-81 | 319 | RTFSDDTMG | 970 | AAVNWSGGSTYY | 1621 | CATDPPLFW |
| | | | | A | | |
| 4A-82 | 320 | RTFGDYAMG | 971 | AAINWSGGYTRY | 1622 | CATDPPLFW |
| | | | | A | | |
| 4A-83 | 321 | RTFGDDTMG | 972 | AAINWSGGYTPYA | 1623 | CATDPPLFW |
| 4A-35 | 322 | RTFGDYIMG | 973 | AAINWSAGYTAY | 1624 | CARASPNTGWHFDRW |
| | | | | A | | |
| 4A-45 | 323 | RTFGDYIMG | 974 | AAINWSGGYTHY | 1625 | CATDPPLFW |
| | | | | A | | |
| 4A-84 | 324 | RTFSDDTMG | 975 | AAITWSGGRTRYA | 1626 | CATDRPLFW |
| 4A-85 | 325 | RTFGDYIMG | 976 | AAINWSGGYTAY | 1627 | CATASPNTGWHFDHW |
| | | | | A | | |
| 4A-86 | 326 | RTFSDDTMG | 977 | AAIHWSGSSTRYA | 1628 | CATDPPLFW |
| 4A-87 | 327 | RTFSDYTMG | 978 | AAINWSGGTTYY | 1629 | CATDPPLFW |
| | | | | A | | |
| 4A-88 | 328 | RTFGDDTMG | 979 | AAINWSGDNTHY | 1630 | CATDPPLFW |
| | | | | A | | |
| 4A-89 | 329 | FAFGDNWIG | 980 | ASISSGGTTAYA | 1631 | CAHRGGWLRPWGYW |
| 4A-9 | 330 | RTFSDDAMG | 981 | GRINWSGGNTYY | 1632 | CATDPPLFW |
| | | | | A | | |
| 4A-91 | 331 | RTFSDDTMG | 982 | GGISWSGGNTYYA | 1633 | CATDPPLFW |
| 4A-92 | 332 | RTFSDDTMG | 983 | AAINWSGGSTYYA | 1634 | CATDPPLFW |
| 4A-46 | 333 | RTFGDDTMG | 984 | AAINWSGGYTYY | 1635 | CATDPPLFW |
| | | | | A | | |
| 4A-20 | 334 | RTFGDYIMG | 985 | AAINWSADYTAY | 1636 | CATDPPLFCWHFDHW |
| | | | | A | | |
| 4A-93 | 335 | RTFSDDAMG | 986 | AAINWSGSSTYYA | 1637 | CATDPPLFW |
| 4A-4 | 336 | RTFGDYIMG | 987 | AAINWIAGYTADA | 1638 | CAEPSPNTGWHFDHW |
| 4A-2 | 337 | RTFGDDTMG | 988 | AAINWSGGNTPYA | 1639 | CATDPPLFW |
| 4A-94 | 338 | RTFSDDTMG | 989 | AAINWSGDNTHY | 1640 | CATDPPLFW |
| | | | | A | | |
| 4A-95 | 339 | RTFGDYIMG | 990 | AAINWSAGYTAY | 1641 | CATAPPLFCWHFDHW |
| | | | | A | | |
| 4A-12 | 340 | FTFGDYVMG | 991 | AAINWNAGYTAY | 1642 | CAKASPNTGWHFDHW |
| | | | | A | | |
| 4A-30 | 341 | RTFGDYTMG | 992 | AAINWTGGYTYY | 1643 | CATDPPLFW |
| | | | | A | | |
| 4A-27 | 342 | RTFGDYIMG | 993 | AAINWSAGYTAY | 1644 | CARATPNTGWHFDHW |
| | | | | A | | |
| 4A-22 | 343 | RTFGDYIMG | 994 | AAINWSGDNTHY | 1645 | CATDPPLFW |
| | | | | A | | |
| 4A-96 | 344 | RTFGDYIMG | 995 | AAINWSAGYTPYA | 1646 | CATDPPLFCCHFDHW |
| 4A-97 | 345 | RTFGDYIMG | 996 | AAINWSAGYTAY | 1647 | CATAPPNTGWHFDHW |
| | | | | A | | |
| 4A-98 | 346 | FTWGDYTMG | 997 | AAINWSGGNTYY | 1648 | CAADRRGLASTRAADYDW |
| | | | | A | | |
| 4A-99 | 347 | IPSTLRAMG | 998 | AAVSSLGPFTRYA | 1649 | CAAKPGWVARDPSQYNW |
| 4A-100 | 348 | FSFDDDYVMG | 999 | AAINWSGGSTYYA | 1650 | CAADRRGLASTRAADYDW |
| 4A-101 | 349 | RTFSNAAMG | 1000 | ARILWTGASRSYA | 1651 | CATTENPNPRW |
| 4A-102 | 350 | GTFGVYHMG | 1001 | AAINMSGDDSAY | 1652 | CAILVGPGQVEFDHW |
| | | | | A | | |
| 4A-103 | 351 | FTFSSYYMG | 1002 | ARISGSTFYA | 1653 | CAALPFVCPSGSYSDYGDEYDW |
| 4A-104 | 352 | RTFSGDFMG | 1003 | GRINWSGGNTYY | 1654 | CPTDPPLFW |
| | | | | A | | |
| 4A-105 | 353 | STLRDYAMG | 1004 | AAITWSGGSTAYA | 1655 | CASLLAGDRYFDYW |
| 4A-106 | 354 | FTFDDYTMG | 1005 | AAITDNGGSKYYA | 1656 | CAADRRGLASTRAADYDW |
| 4A-107 | 355 | GTFSSYGMG | 1006 | AAINWSGASTYYA | 1657 | CARDWRDRTWGNSLDYW |
| 4A-108 | 356 | FSFDDDYVMG | 1007 | AAISWSEDNTYYA | 1658 | CAADRRGLASTRAADYDW |
| 4A-109 | 357 | FSFDDDYVMG | 1008 | AAVSGSGDDTYY | 1659 | CAADRRGLASTRAADYDW |
| | | | | A | | |
| 4A-110 | 358 | NIAAINVMG | 1009 | AAISASGRRTDYA | 1660 | CARRVYYYDSSGPPGVTFDIW |
| 4A-111 | 359 | IITSRYVMG | 1010 | AAISTGGSTIYA | 1661 | CARQDSSSPYFDYW |
| 4A-112 | 360 | FSFDDDYVMG | 1011 | AAISNSGLSTYYA | 1662 | CAADRRGLASTRAADYDW |
| 4A-113 | 361 | SISSINVMG | 1012 | ATMRWSTGSTYY | 1663 | CAQRVRGFFGPLRTTPSWYEW |
| | | | | A | | |
| 4A-114 | 362 | LTFILYRMG | 1013 | AAINNFGTTKYA | 1664 | CARTHYDFWSGYTSRTPNYFDYW |
| 4A-115 | 363 | GTFSVYHMG | 1014 | AAISWSGGSTAYA | 1665 | CAAVNTWTSPSFDSW |
| 4A-116 | 364 | RAFSTYGMG | 1015 | AGINWSGDTPYYA | 1666 | CAREVGPPPGYFDLW |
| 4A-117 | 365 | RTFSDIAMG | 1016 | ASINWGGGNTYY | 1667 | CAAKGIWDYLGRRDFGDW |
| | | | | A | | |
| 4A-118 | 366 | RTFSSARMG | 1017 | AAISWSGDNTHYA | 1668 | CATTENPNPRW |
| 4A-119 | 367 | FAFSSYAMG | 1018 | ATINGDDYTYYA | 1669 | CVATPGGYGLW |
| 4A-120 | 368 | ITFRRHDMG | 1019 | AAIRWSSSSTVYA | 1670 | CAADRGVYGGRWYRTSQYTW |
| 4A-121 | 369 | TAASFNPMG | 1020 | AAITSGGSTNYA | 1671 | CAAIAYEEGVYRWDW |
| 4A-122 | 370 | NINIINYMG | 1021 | AAIHWNGDSTAY | 1672 | CASGPPYSNYFAYW |
| | | | | A | | |
| 4A-123 | 371 | FTFDDYAMG | 1022 | AAISGSGGSTAYA | 1673 | CAKIMGSGRPYFDHW |
| 4A-124 | 372 | NIFTRNVMG | 1023 | AAITSSGSTNYA | 1674 | CARPSSDLQGGVDYW |
| 4A-125 | 373 | RTFSSIAMG | 1024 | ASINWGGGNTIYA | 1675 | CAAKGIWDYLGRRDFGDW |
| 4A-126 | 374 | IPSTLRAMG | 1025 | AAVSSLGPFTRYA | 1676 | CAAKPGWVARDPSEYNW |
| 4A-127 | 375 | FTLDDSAMG | 1026 | AAITNGGSTYYA | 1677 | CARFARGSPYFDFW |
| 4A-128 | 376 | SISSFNAMG | 1027 | AAIDWDGSTAYA | 1678 | CARGGGYYGSGSFEYW |
| 4A-129 | 377 | NIFSDNIIG | 1028 | AYYTSGGSIDYA | 1679 | CARGTAVGRPPPGGMDVW |
| 4A-130 | 378 | SISSIGAMG | 1029 | AAISSSGSSTVYA | 1680 | CARVPPGQAYFDSW |
| 4A-131 | 379 | FTFDDYGMG | 1030 | ATITWSGDSTYYA | 1681 | CAKGGSWYYDSSGYYGRW |
| 4A-132 | 380 | RTFSNYTMG | 1031 | SAISWSTGSTYYA | 1682 | CAADRYGPPWYDW |
| 4A-133 | 381 | STNYMG | 1032 | AAISMSGDDTIYA | 1683 | CARIGLRGRYFDLW |
| 4A-134 | 382 | GTFSSVGMG | 1033 | AVINWSGARTYY | 1684 | CAVPWMDYNRRDW |
| | | | | A | | |
| 4A-135 | 383 | RIFTNTAMG | 1034 | AAINWSGGSTAYA | 1685 | CARTSGSYSFDYW |
| 4A-136 | 384 | EEFSDHWMG | 1035 | GAIHWSGGRTYY | 1686 | CAADRRGLASTRAADYDW |
| | | | | A | | |
| 4A-137 | 385 | RTFSSIAMG | 1036 | AAINWSGARTAY | 1687 | CAAKGIWDYLGRRDFGDW |
| | | | | A | | |
| 4A-138 | 386 | STSSLRTMG | 1037 | AAISSRDGSTIYA | 1688 | CARDDSSSPYFDYW |
| 4A-139 | 387 | GGTFGSYAMG | 1038 | AAISIASGASGGTT | 1689 | CATTMNPNPRW |
| | | | | NYA | | |
| 4A-140 | 388 | RTFSNAAMG | 1039 | ARITWNGGSTFYA | 1690 | CATTENPNPRW |
| 4A-141 | 389 | IILSDNAMG | 1040 | AAISWLGESTYYA | 1691 | CAADRRGLASTRAADYDW |
| 4A-142 | 390 | RTFGDYIMG | 1041 | AAINWNGGYTAY | 1692 | CATTSPNTGWHYYRW |
| | | | | A | | |
| 4A-143 | 391 | FNFNWYPMG | 1042 | AAISWTGVSTYTA | 1693 | CARWGPGPAGGSPGLVGFDYW |
| | | | | YA | | |
| 4A-144 | 392 | SIRSVSVMG | 1043 | AAISWSGVGTAYA | 1694 | CAAYQRGWGDW |
| 4A-145 | 393 | MTFRLYAMG | 1044 | GAINWLSESTYYA | 1695 | CAAKPGWVARDPSEYNW |
| 4A-146 | 394 | RTFSDDAMG | 1045 | AAINWSGGSTYYA | 1696 | CATDPPLFW |
| 4A-147 | 395 | GTFSVYAMG | 1046 | AAISMSGDDAAY | 1697 | CAKISKDDGGKPRGAFFDSW |
| | | | | A | | |
| 4A-148 | 396 | FALGYYAMG | 1047 | AAISSRDGSTAYA | 1698 | CARLATGPQAYFHHW |
| 4A-149 | 397 | FNLDDYAMG | 1048 | AAISWDGGATAY | 1699 | CARVGRGTTAFDSW |
| | | | | A | | |
| 4A-150 | 398 | NTFSGGFMG | 1049 | ASIRSGARTYYA | 1700 | CAQRVRGFFGPLRTTPSWYEW |
| 4A-151 | 399 | SIRSINIMG | 1050 | AAISWSGGSTVYA | 1701 | CASLLAGDRYFDYW |
| 5A-1 | 400 | GTFSSIGMG | 1051 | AAISWDGGATAY | 1702 | CAKEDVGKPFDW |
| | | | | A | | |
| 5A-2 | 401 | LRFDDYAMG | 1052 | AIKFSGGTTDYA | 1703 | CASWDGLIGLDAYEYDW |
| 5A-3 | 402 | SIFSIDVMG | 1053 | AGISWSGDSTLYA | 1704 | CAAFDGYTGSDW |
| 5A-4 | 403 | FTLADYAMG | 1054 | AVITCSGGSTDYA | 1705 | CAADDCYIGCGW |
| 5A-5 | 404 | RTFSSIAMG | 1055 | AEITEGGISPSGDN | 1706 | CAAELHSSDYTSPGAESDYGW |
| | | | | IYYA | | |
| 5A-6 | 405 | PTFSSYAMMG | 1056 | AAINNFGTTKYA | 1707 | CAASASDYGLGLELFHDEYNW |
| 5A-7 | 406 | STGYMG | 1057 | AAIHSGGSTNYA | 1708 | CATVATALIW |
| 5A-8 | 407 | RPFSEYTMG | 1058 | SSIHWGGRGTNYA | 1709 | CAAELHSSDYTSPGAYAW |
| 5A-9 | 408 | LTLSTYGMG | 1059 | AHIPRSTYSPYYA | 1710 | CAAIGDGAVW |
| 5A-10 | 409 | FTFNNHNMG | 1060 | AAISSYSHTAYA | 1711 | CALQPFGASNYRW |
| 5A-11 | 410 | GIYRVMG | 1061 | ASISSGGGINYA | 1712 | CAAESWGRQW |
| 5A-12 | 411 | YTDSNLWMG | 1062 | AINRSTGSTSYA | 1713 | CATSGSGSPNW |
| 5A-13 | 412 | FTFDYYTMG | 1063 | AAIRSSGGLFYA | 1714 | CAAYLDGYSGSW |
| 5A-14 | 413 | GIFSINVMG | 1064 | SAIRWNGGNTAY | 1715 | CAGFDGYTGSDW |
| | | | | A | | |
| 5A-15 | 414 | FTFDGAAMG | 1065 | ATIRWTNSTDYA | 1716 | CARGRYGIVERW |
| 5A-16 | 415 | RTHSIYPMG | 1066 | AAIHSGGATVYA | 1717 | CAARRWIPPGPIW |
| 5A-17 | 416 | PTFSIYAMG | 1067 | AGIRWSDVYTQY | 1718 | CALDIDYRDW |
| | | | | A | | |
| 5A-18 | 417 | LTFDDNIHVM | 1068 | AAIHWSGGSTIYA | 1719 | CAADVYPQDYGLGYVEGKMYYG |
| | | G | | | | MDW |
| 5A-19 | 418 | LTLDYYAMG | 1069 | ASINWSGGSTYYA | 1720 | CAAYGSGEFDW |
| 5A-20 | 419 | RTIVPYTMG | 1070 | AAISPSAFTEYA | 1721 | CAARRWGYDW |
| 5A-21 | 420 | GTFTTYHMG | 1071 | AHISTGGATNYA | 1722 | CATFPAIVTDSDYDLGNDW |
| 5A-22 | 421 | FTFNVFAMG | 1072 | AAINWSDSRTDYA | 1723 | CASGSDNRARELSRYEYVW |
| 5A-23 | 422 | SIFSIDVMG | 1073 | AAISWSGESTLYA | 1724 | CAAFDGYSGSDW |
| 5A-24 | 423 | FTFSSYSMG | 1074 | AAISSYSHTAYA | 1725 | CALQPFGASSYRW |
| 5A-25 | 424 | NTFSINVMG | 1075 | AAIHWSGDSTLYA | 1726 | CAAFDGYSGNHW |
| 5A-26 | 425 | RTISSYIMG | 1076 | ARIYTGGDTIYA | 1727 | CAARTSYNGRYDYIDDYSW |
| 5A-27 | 426 | RANSINWMG | 1077 | ATITPGGNTNYA | 1728 | CAAAAGSTWYGTLYEYDW |
| 5A-28 | 427 | GTFSVFAMG | 1078 | AEITAGGSTYYA | 1729 | CAVDGPFGW |
| 5A-29 | 428 | FTFDDYPMG | 1079 | ASVLRGGYTWYA | 1730 | CAKDWATGLAW |
| 5A-30 | 429 | FALGYYAMG | 1080 | AGIRWTDAYTEY | 1731 | CAADVSPSYGSRWYW |
| | | | | A | | |
| 5A-31 | 430 | RTLDIHVMG | 1081 | AVINWTGESTLYA | 1732 | CAAFDGYTGNYW |
| 5A-32 | 431 | FTPDNYAMG | 1082 | AALGWSGVTTYH | 1733 | CASDESDAANW |
| | | | | YYA | | |
| 5A-33 | 432 | FTFDDYAMG | 1083 | ATIMWSGNTTYY | 1734 | CATNDDDV |
| | | | | A | | |
| 5A-34 | 433 | RTFSRYIMG | 1084 | AAISWSGGDNTYY | 1735 | CAAYRIVVGGTSPGDWRW |
| | | | | A | | |
| 5A-35 | 434 | PTFSIYAMG | 1085 | AGISWNGGSTNYA | 1736 | CALRRRFGGQEW |
| 5A-36 | 435 | RTFSLNAMG | 1086 | AAISCGGGSTYA | 1737 | CAADNDMGYCSW |
| 5A-37 | 436 | STFSINAMG | 1087 | GGISRSGATTNYA | 1738 | CAADGVPEYSDYASGPVW |
| 5A-38 | 437 | RTFSMHAMG | 1088 | ASISSQGRTNYA | 1739 | CAAEVRNGSDYLPIDW |
| 5A-39 | 438 | VTLDLYAMG | 1089 | AGIRWTDAYTEY | 1740 | CAVDIDYRDW |
| | | | | A | | |
| 5A-40 | 439 | LPFTINVMG | 1090 | AAIHWSGLTTFYA | 1741 | CAELDGYFFAHW |
| 5A-41 | 440 | RAFSNYAMG | 1091 | AWINNRGTTDYA | 1742 | CASTDDYGVDW |
| | | | | DSGSTYYA | | |
| 5A-42 | 441 | FTPDDYAMG | 1092 | ASIGYSGRSNSYN | 1743 | CAIAHGSSTYNW |
| | | | | YYA | | |
| 5A-43 | 442 | FTLNYYGMG | 1093 | AAITSGGAPHYA | 1744 | CASAYDRGIGYDW |
| 5A-44 | 443 | LPFSTKSMG | 1094 | AAIHWSGLTSYA | 1745 | CAADRAADFFAQRDEYDW |
| 5A-45 | 444 | RTFSINAMG | 1095 | AAISWSGESTQYA | 1746 | CAAFDGGSGTQW |
| 5A-46 | 445 | EEFSDHWMG | 1096 | AAIHWSGDSTHRN | 1747 | CATVGITLNW |
| | | | | YA | | |
| 5A-47 | 446 | FTFGSYDMG | 1097 | TAINWSGARTAYA | 1748 | CAARSVYSYEYNW |
| 5A-48 | 447 | LPLDLYAMG | 1098 | AGIRWSDAYTEYA | 1749 | CALDIDYRHW |
| 5A-49 | 448 | RTSTVNGMG | 1099 | ASISQSGAATAYA | 1750 | CAADRTYSYSSTGYYW |
| 5A-50 | 449 | FSLDYYGMG | 1100 | AAITSGGTPHYA | 1751 | CASAYNPGIGYDW |
| 5A-51 | 450 | RPNSINWMG | 1101 | ATITPGGNTNYA | 1752 | CAAAAGTTWYGTLYEYDW |
| 5A-52 | 451 | EKFSDHWMG | 1102 | ATITFSGARTAYA | 1753 | CAALIKPSSTDRIFEEW |
| 5A-53 | 452 | LTVVPYAMG | 1103 | AAIRRSAVTNYA | 1754 | CAARRWGYHYW |
| 5A-54 | 453 | TTFNFNVMG | 1104 | AVISWTGESTLYA | 1755 | CAAFDGYTGRDW |
| 5A-55 | 454 | IDVNRNAMG | 1105 | AAITWSGGWRYY | 1756 | CATTFGDAGIPDQYDFGW |
| | | | | A | | |
| 5A-56 | 455 | RTFSSNMG | 1106 | ARIFGGDRTLYA | 1757 | CADINGDW |
| 5A-57 | 456 | GTFSMGWIR | 1107 | GCIGWITYYA | 1758 | CAPFGW |
| 5A-58 | 457 | CTLDYYAMG | 1108 | AGIRWTDAYTEY | 1759 | CAADVSPSYGGRWYW |
| | | | | A | | |
| 5A-59 | 458 | LTFSLYRMC | 1109 | SCISNIDGSTYYA | 1760 | CAADLLGDSDYEPSSGFGW |
| 5A-60 | 459 | RSFSSHRMG | 1110 | AAIMWSGSHRNY | 1761 | CAAIAYEEGVYRWDW |
| | | | | A | | |
| 5A-61 | 460 | RIIVPNTMG | 1111 | TGISPSAFTEYA | 1762 | CAAHGWGCHW |
| 5A-62 | 461 | SIFIISMG | 1112 | TGINWSGGSTTYA | 1763 | CAASAIGSGALRRFEYDW |
| 5A-63 | 462 | FSLDYYDMG | 1113 | AALGWSGGSTDY | 1764 | CAAGNGGRYGIVERW |
| | | | | A | | |
| 5A-64 | 463 | TSISNRVMG | 1114 | ARIYTGGDTLYA | 1765 | CAARKIYRSLSYYGDYDW |
| 5A-65 | 464 | NIDRLYAMG | 1115 | AAIDSDGSTDYA | 1766 | CAALIDYGLGFPIEW |
| 5A-66 | 465 | NTFTINVMG | 1116 | AAINWNGGTTLY | 1767 | CAAFDGYSGIDW |
| | | | | A | | |
| 5A-67 | 466 | FNVNDYAMG | 1117 | AGITSSVGVTNYA | 1768 | CAADIFFVNW |
| 5A-68 | 467 | FTFDHYTMG | 1118 | AAISGSENVTSYA | 1769 | CAAEPYIPVRTMRHMTFLTW |
| 6A-1 | 468 | RTFGNYNMG | 1119 | ATINSLGGTSYA | 1770 | CARVDYYMDVW |
| 6A-2 | 469 | FTMSSSWMG | 1120 | TVISGVGTSYA | 1771 | CARGPDSSGYGFDYW |
| 6A-3 | 470 | FTFSPSWMG | 1121 | ATINEYGGRNYA | 1772 | CARVDRDFDYW |
| 6A-4 | 471 | FTRDYYTMG | 1122 | AAISRSGSLTSYA | 1773 | CANLAYYDSSGYYDYW |
| 6A-5 | 472 | RTFTMG | 1123 | ASTNSAGSTNYA | 1774 | CTTVDQYFDYW |
| 6A-6 | 473 | TTLDYYAMG | 1124 | AAISWSGGSTAYA | 1775 | CAREDYYDSSGYSW |
| 6A-7 | 474 | FTFSSYWMG | 1125 | ATINWSGVTAYA | 1776 | CARADDYFDYW |
| 6A-8 | 475 | FTLSGIWMG | 1126 | AIITTGGRTTYA | 1777 | CAGYSTFGSSSAYYYYSMDVG |
| 6A-9 | 476 | FTFDYYAMG | 1127 | SAIDSEGRTSYA | 1778 | CARWGPFDIW |
| 6A-10 | 477 | SIASIHAMG | 1128 | AAISRSGGFGSYA | 1779 | CARDDKYYDSSGYPAYFQHW |
| 6A-11 | 478 | LAFNAYAMG | 1129 | ATIGWSGANTYY | 1780 | CASDPPGW |
| | | | | A | | |
| 6A-12 | 479 | STYTTYSMG | 1130 | AAISGSENVTSYA | 1781 | CARVDDYMDVW |
| 6A-13 | 480 | LTFNDYAMG | 1131 | AHIPRSTYSPYYA | 1782 | CAFLVGPQGVDHGAFDVW |
| 6A-14 | 481 | ITFRFKAMG | 1132 | AAVSWDGRNTYY | 1783 | CASDYYYMDVW |
| | | | | A | | |
| 6A-15 | 482 | STVLINAMG | 1133 | AAVRWSDDYTYY | 1784 | CAKEGRAGSLDYW |
| | | | | A | | |
| 6A-16 | 483 | FTFDDAAMG | 1134 | AHISWSGGSTYYA | 1785 | CATFGATVTATNDAFDIW |
| 6A-17 | 484 | NTGSTGYMG | 1135 | AGVINDGSTVYA | 1786 | CARLATSHQDGTGYLFDYW |
| 6A-18 | 485 | LTFRNYAMG | 1136 | AGMMWSGGTTTY | 1787 | CAREGYYYDSSGYLNYFDYW |
| | | | | A | | |
| 6A-19 | 486 | SILSIAVMG | 1137 | AAISPSAVTTYYA | 1788 | CAIGYYDSSGYFDYW |
| 6A-20 | 487 | STLPYHAMG | 1138 | AAITWNGASTSYA | 1789 | CARDRYYDTSASYFESETW |
| 6A-21 | 488 | TLFKINAMG | 1139 | AAITSSGSNIDYTY | 1790 | CARSNTGWYSFDYW |
| | | | | YA | | |
| 6A-22 | 489 | RTFSEVVMG | 1140 | ATIHSSGSTSYA | 1791 | CVRVTSDYSMDSW |
| 6A-23 | 490 | SIFSMNTMG | 1141 | ALINRSGGGINYA | 1792 | CVRLSSGYYDFDYW |
| 6A-24 | 491 | FTLDYYAMG | 1142 | AAINWSGDNTHY | 1793 | CARAPFYCTTTKCQDNYYYMDV |
| | | | | A | | W |
| 6A-25 | 492 | LTFGTYTMG | 1143 | AAISRFGSTYYA | 1794 | CARGGDYDFWSVDYMDVW |
| 6A-26 | 493 | DTFSTSWMG | 1144 | ATINTGGGTNYA | 1795 | CARVTTSFDYW |
| 6A-27 | 494 | ITFRFKAMG | 1145 | ASISRSGTTYYA | 1796 | CATDYSAFDMW |
| 6A-28 | 495 | DTYGSYWMG | 1146 | ATITSDDRTNYA | 1797 | CARVTSSLSGMDVW |
| 6A-29 | 496 | YTLKNYYAM | 1147 | AAIIWTGESTLDA | 1798 | CAREGYYDSSGYYW |
| | | G | | | | |
| 6A-30 | 497 | FAFGDSWMG | 1148 | ATINWSGVTAYA | 1799 | CARADGYFDYW |
| 6A-31 | 498 | DTFSANRMG | 1149 | ASITWSSANTYYA | 1800 | CATFNWNDEGFDFW |
| 6A-32 | 499 | FTLDYYDMG | 1150 | ALISWSGGSTYYA | 1801 | CATDFYGWGTRERDAFDIW |
| 6A-33 | 500 | TFQRINHMG | 1151 | ATINTGGQPNYA | 1802 | CASLIAAQDYYFDYW |
| 6A-34 | 501 | SAFRSNAMG | 1152 | AHISWSSKSTYYA | 1803 | CATYCSSTSCFDYW |
| 6A-35 | 502 | FTLAYYAMG | 1153 | AAISMSGDDTIYA | 1804 | CARELGYSSTVWPW |
| 6A-36 | 503 | FDFSVSWMG | 1154 | TAITWSGDSTNYA | 1805 | CASLLHTGPSGGNYFDYW |
| 6A-37 | 504 | HTFSTSWMG | 1155 | ATINSLGGTNYA | 1806 | CARVSSGDYGMDVW |
| 6A-38 | 505 | NTFSGGFMG | 1156 | AVISSLSSKSYA | 1807 | CAKVDSGYDYW |
| 6A-39 | 506 | FTFSPSWMG | 1157 | AAISWSGGSTAYA | 1808 | CHGLGEGDPYGDYEGYFDLW |
| 6A-40 | 507 | FTFSDYWMG | 1158 | ARVWWNGGSAY | 1809 | CAREVLRQQVVLDYW |
| | | | | YA | | |
| 6A-41 | 508 | FTFSTSWMG | 1159 | ASINEYGGRNYA | 1810 | CAGLHYYYDSSGYNPTEYYGMDV |
| | | | | | | W |
| 6A-42 | 509 | DTYGSYWMG | 1160 | AVITSGGSTNYA | 1811 | CTHVQNSYYYAMDVW |
| 6A-43 | 510 | RTFSSYAMMG | 1161 | ASVNWDASQINY | 1812 | CTTLGAVYFDSSGYHDYFDYW |
| | | | | A | | |
| 6A-44 | 511 | GTFGVYHMG | 1162 | GRITWTDGSTYYA | 1813 | CFGLLEVYDMTFDYW |
| 6A-45 | 512 | NMFSINAMG | 1163 | TLISWSSGRTSYA | 1814 | CASLGYCSGGSCFDYW |
| 6A-46 | 513 | LTFSAMG | 1164 | ALIRRDGSTIYA | 1815 | CAALGILFGYDAFDIW |
| 6A-47 | 514 | RTFSMHAMG | 1165 | ASITYGGNINYA | 1816 | CAKEGYYDSTGYRTYFQQW |
| 6A-48 | 515 | FTVSNYAMG | 1166 | ASVNWSGGTTSY | 1817 | CATTGTVTLGYW |
| | | | | A | | |
| 6A-49 | 516 | STVLINAMG | 1167 | AAISWSPGRTDYA | 1818 | CARDCSGGSCYSGDYW |
| 6A-50 | 517 | FSFDRWAMG | 1168 | ASLATGGNTNYA | 1819 | CARVTNYDAFDIW |
| 6A-51 | 518 | YTYSSYVMG | 1169 | AAISRFGSTYYA | 1820 | CARDSGEHFWDSGYIDHW |
| 6A-52 | 519 | DTYGSYWMG | 1170 | AAITSGGSTVYA | 1821 | CARVDSRFDYW |
| 6A-53 | 520 | ISINTNVMG | 1171 | AAISTGSVTIYA | 1822 | CARVDDFGYFDLW |
| 6A-54 | 521 | FEFENHWMG | 1172 | AHITAGGLSNYA | 1823 | CGRHWGIYDSSGFSSFDYW |
| 6A-55 | 522 | FTMSSSWMG | 1173 | ARITSGGSTGYA | 1824 | CASVDGYFDYW |
| 6A-56 | 523 | NIFRSNMG | 1174 | AGITWNGDTTYY | 1825 | CARALGVTYQFDYW |
| | | | | A | | |
| 6A-57 | 524 | LTFDDHSMG | 1175 | AAVPLSGNTYYA | 1826 | CASFSGGPADFDYW |
| 6A-58 | 525 | RAVSTYAMG | 1176 | AAISGSENVTSYA | 1827 | CLSVTGDTEDYGVFDTW |
| 6A-59 | 526 | ISGSVFSRTPM | 1177 | SSIYSDGSNTYYA | 1828 | CAHWSWELGDWFDPW |
| | | G | | | | |
| 6A-60 | 527 | DTYGSYWMG | 1178 | ATISQSGAATAYA | 1829 | CAGLLRYSGTYYDAFDVW |
| 6A-61 | 528 | DTYGSYWMG | 1179 | AAINWSGGSTNYA | 1830 | CAGLGWNYMDYW |
| 6A-62 | 529 | STFSGNWMG | 1180 | AVISWTGGSTYYA | 1831 | CATHNSLSGFDYW |
| 6A-63 | 530 | QTFNMG | 1181 | AAIGSGGSTSYA | 1832 | CWRLGNDYFDYW |
| 6A-64 | 531 | IPSIHAMG | 1182 | AAINWSHGVTYY | 1833 | CGGGYGYHFDYW |
| | | | | A | | |
| 6A-65 | 532 | LPFSTLHMG | 1183 | ASLSIFGATGYA | 1834 | CWMYYYDSSGYYGNYYYGMDV |
| | | | | | | W |
| 6A-66 | 533 | LTFSLFAMG | 1184 | AAISSGGSTDYA | 1835 | CARGNTKYYYDSSGYSSAFDYW |
| 6A-67 | 534 | SFSNYAMG | 1185 | AAISSSGALTSYA | 1836 | CWIVGPGPLDGMDVW |
| 6A-68 | 535 | FTLSDRAMG | 1186 | AHITAGGLSNYA | 1837 | CVHLASQTGAGYFDLW |
| 6A-69 | 536 | GTFSSVGMG | 1187 | AGISRSGGTYYA | 1838 | CARYDFWSGYPYW |
| 6A-70 | 537 | FNLDDYADM | 1188 | AAIGWGGGSTRY | 1839 | CAREILWFGEFGEPNVW |
| | | G | | A | | |
| 6A-71 | 538 | ITFSNDAMG | 1189 | AIITSSDTNDTTNY | 1840 | CARLHYYDSSGYFDYW |
| | | | | A | | |
| 6A-72 | 539 | STLSINAMG | 1190 | AAIDWSGGSTAYA | 1841 | CARDSSATRTGPDYW |
| 6A-73 | 540 | HTFSGYAMG | 1191 | AVITREGSTYYA | 1842 | CARLGGEGFDYW |
| 6A-74 | 541 | FAFGDSWMG | 1192 | AAITSGGSTDYA | 1843 | CARGLLWFGELFGYW |
| 6A-75 | 542 | GTFSTYWMG | 1193 | AAISRSGGNTYYA | 1844 | CVRHSGTDGDSSFDYW |
| 6A-76 | 543 | LAFDFDGMG | 1194 | AAINSGGSTYYA | 1845 | CARFFRAHDYW |
| 6A-77 | 544 | FTFDRSWMG | 1195 | AAVTEGGTTSYA | 1846 | CARADYDFDYW |
| 6A-78 | 545 | RTYDAMG | 1196 | ASVTSGGYTHYA | 1847 | CAKFGRKIVGATELDYW |
| 6A-79 | 546 | SISSIDYMG | 1197 | SWISSSDGSTYYA | 1848 | CARSPSFSQIYYYYYMDVW |
| 6A-80 | 547 | GTFSFYNMG | 1198 | AFISGNGGTSYA | 1849 | CAVVAMRMVTTEGPDVLDVW |
| 6A-81 | 548 | FIGNYHAMG | 1199 | AAVTWSGGTTNY | 1850 | CAREGYYYDSSGYPYYFDYW |
| | | | | A | | |
| 6A-82 | 549 | SSLDAYGMG | 1200 | AAISWGGGSIYYA | 1851 | CARLSQGMVALDYW |
| 6A-83 | 550 | SIASIHAMG | 1201 | AAITWSGAITSYA | 1852 | CAKDGGYGELHYGMEVW |
| 6A-84 | 551 | FTPDDYAMG | 1202 | AAINSGGSYTYYA | 1853 | CARDRGPW |
| 6A-85 | 552 | GTFSVFAMG | 1203 | SAINWSGGSLLYA | 1854 | CALFGDFDYW |
| 6A-86 | 553 | PISGINRMG | 1204 | AVITSNGRPSYA | 1855 | CVRLSSGYFDFDYW |
| 6A-87 | 554 | TSIMVGAMG | 1205 | AIIRGDGRTSYA | 1856 | CARFAGWDAFDIW |
| 6A-88 | 555 | RTFSTHWMG | 1206 | AVINWSGGSIYYA | 1857 | CARLSSDGYNYFDFW |
| 6A-89 | 556 | TIFASAMG | 1207 | AVVNWNGSSTVY | 1858 | CTTVDQYFNYW |
| | | | | A | | |
| 6A-90 | 557 | FPFSIWPMG | 1208 | AAVRWSSTYYA | 1859 | CATGECDGGSCSLAYW |
| 6A-91 | 558 | RTFGNYAMG | 1209 | ASISSSGVSKHYA | 1860 | CVRFGSSWARDLDQW |
| 6A-92 | 559 | FLFDSYASMG | 1210 | ATIWRRGNTYYA | 1861 | CTETGTAAW |
| | | | | NYA | | |
| 6A-93 | 560 | LPFSTKSMG | 1211 | AAISMSGLTSYA | 1862 | CLKVLGGDYEADNWFDYW |
| 6A-94 | 561 | NIFRIETMG | 1212 | AGIIRSGGETLYA | 1863 | CARSLYYDRSGSYYFDYW |
| 6A-95 | 562 | IPSSIRAMG | 1213 | AVIRWTGGSTYYA | 1864 | CARDIGYYDSSGYYNDGGFDYW |
| 6A-96 | 563 | FTLSGNWMG | 1214 | AIITSGGRTNYA | 1865 | CAGHATFGGSSSSYYYGMDVW |
| 6A-97 | 564 | FTFSSLAMG | 1215 | AAITWSGDITNYA | 1866 | CLRLSSSGFDHW |
| 6A-98 | 565 | TFGHYAMG | 1216 | AAINWSSRSTVYA | 1867 | CAKSDGLMGELRSASAFDIW |
| 6A-99 | 566 | IPFRSRTMG | 1217 | AGISRSGASTAYA | 1868 | CTHANDYGDYW |
| 6A-100 | 567 | GTFSTSWMG | 1218 | AHITAGGLSNYA | 1869 | CARLLVREDWYFDLW |
| 6A-101 | 568 | GTFSLFAMG | 1219 | AAISWTGDSTYYK | 1870 | CAYNNSSGEYW |
| | | | | YYA | | |
| 6A-102 | 569 | SSFSAYAMG | 1220 | SAIDSEGTTTYA | 1871 | CAGDYNFWSGFDHW |
| 6A-103 | 570 | RTSSPIAMG | 1221 | AVRWSDDYTYYA | 1872 | CAKKLGGYYAFDIW |
| 6A-104 | 571 | LTFNQYTMG | 1222 | ASITDGGSTYYA | 1873 | CARDSRYMDVW |
| 6A-105 | 572 | PTFSSMG | 1223 | AAISWDGGATAY | 1874 | CAIEIVVGGIYW |
| | | | | A | | |
| 6A-106 | 573 | IPSTLRAMG | 1224 | AATSWSGGSKYY | 1875 | CATDLYYMDVW |
| | | | | A | | |
| 6A-107 | 574 | GVGFSVTNMG | 1225 | AVISSSSSTNYA | 1876 | CTTFNWNDEGFDYW |
| 6A-108 | 575 | GTFGSYGMG | 1226 | AAIRWSGGITYYA | 1877 | CARERYWNPLPYYYYGMDVW |
| 6A-109 | 576 | GTFSTYAMG | 1227 | ASIDWSGLTSYA | 1878 | CARGPFYMYCSGTKCYSTNWFDP |
| | | | | | | W |
| 6A-110 | 577 | PIYAVNRMG | 1228 | AGIWRSGGHRDY | 1879 | CARGEIDILTGYWYDYW |
| | | | | A | | |
| 6A-111 | 578 | FTFSNYWMG | 1229 | GGISRSGVSTSYA | 1880 | CTTLLYYYDSSGYSFDAFDIW |
| 6A-112 | 579 | GTFSAYHMG | 1230 | TIIDNGGPTSYA | 1881 | CTALLYYFDNSGYNFDPFDIW |
| 9A-1 | 580 | RTFSRLAMG | 1231 | AAISRSGRSTSYA | 1882 | CAARRSQILFTSRTDYEW |
| 9A-2 | 581 | SFSIAAMG | 1232 | ATINYSGGGTYYA | 1883 | CAAVNTFDESAYAAFACYDVVW |
| 9A-3 | 582 | RTFSRYAMG | 1233 | AAISRSGKSTYYA | 1884 | CAASSVFSDLRYRKNPKW |
| 9A-4 | 583 | RTFSKYAMG | 1234 | ALITPSSRTTYYA | 1885 | CAIAGRGRW |
| 9A-5 | 584 | RTFRRYAMG | 1235 | ASINWGGGNTYY | 1886 | CAKTKRTGIFTTARMVDW |
| | | | | A | | |
| 9A-6 | 585 | RTFSRFAMG | 1236 | AAIRWSGGRTVY | 1887 | CAIEPGTIRNWRNRVPFARGNFGW |
| | | | | A | | |
| 9A-7 | 586 | LGIAFSRRTA | 1237 | AAISWRGGNTYY | 1888 | CAARRWIPPGPIW |
| | | MG | | A | | |
| 9A-8 | 587 | RTFRRYPMG | 1238 | AAISRSGGSTYYA | 1889 | CAAKRLRSFASGGSYDW |
| 9A-9 | 588 | GTLRGYGMG | 1239 | ASISRSGGSTYYA | 1890 | CAARRRVTLFTSRADYDW |
| 9A-10 | 589 | RMFSSRSMG | 1240 | ALINRSGGSQFYA | 1891 | CAARRWIPPGPIW |
| 9A-11 | 590 | RTFGRRAMG | 1241 | AGISRGGGTNYA | 1892 | CAAKGIWDYLGRRDFGDW |
| 10A-1 | 591 | LSSPPFDDFPM | 1242 | SSIYSDDGDSMYA | 1893 | CARQTFDFWSASLGGNFWYFDLW |
| | | G | | | | |
| 10A-2 | 592 | GTFSSYSMG | 1243 | SAISWIIGSGGTTN | 1894 | CTAGAGDSW |
| | | | | YA | | |
| 10A-3 | 593 | SIFSTRTMG | 1244 | ASITKFGSTNYA | 1895 | CTRGGGRFFDWLYLRW |
| 10A-4 | 594 | RTLWRSNMG | 1245 | ASISSFGSTKYA | 1896 | CARGHGRYFDWLLFARPPDYW |
| 10A-5 | 595 | RSLGIYRMG | 1246 | AAITSGGRKNYA | 1897 | CAKRTIFGVGRWLDPW |
| 10A-6 | 596 | TTLTFRIMG | 1247 | PAISSTGLASYT | 1898 | CSKDRAPNCFACCPNGFDVW |
| 10A-7 | 597 | SRFSGRFNI | 1248 | ARIGYSGQSISYA | 1899 | CARGRFLGGTEW |
| | | LNMG | | | | |
| 10A-8 | 598 | TLFKINAMG | 1249 | AQINRHGVTYYA | 1900 | CARGRTIFFGGGRYFDYW |
| 10A-9 | 599 | IPFRSRTMG | 1250 | AGITGSGRSQYYA | 1901 | CARGARIFGSVAPWRGGNYYGMD |
| | | | | | | VW |
| 10A-10 | 600 | FTFSSFRMG | 1251 | AGISRGGSTNYA | 1902 | CARASGLWFRRPHVW |
| 10A-11 | 601 | RNFRRNSMG | 1252 | AGISWSGARTHYA | 1903 | CARVSRRPRSPPGYYYGMDVW |
| 10A-12 | 602 | RNLRMYRMG | 1253 | ATIRWSDGSTYYA | 1904 | CTRARLRYFDWLFPTNFDYW |
| 10A-13 | 603 | GLTFSSNTMG | 1254 | ASISSSGRTSYA | 1905 | CARRVRRLWFRSYFDLW |
| 10A-14 | 604 | FTLAYYAMG | 1255 | AAISWSGRNINYA | 1906 | CARERARWFGKFSVSW |
| 10A-15 | 605 | RTFSSFPMG | 1256 | AAISWSGSTSYA | 1907 | SACGRLGFGAW |
| 10A-16 | 606 | ISSSKRNMG | 1257 | ATWTSRGITTYA | 1908 | CARGGPPRLWGSYRRKYFDYW |
| 10A-17 | 607 | RTFSIYAMG | 1258 | ARITRGGITKYA | 1909 | CARGLGWLLGYYW |
| 10A-18 | 608 | RMYNSYSMG | 1259 | ARISPGGTFYA | 1910 | CTTSARSGWFWRYFDSW |
| 10A-19 | 609 | RTFRSYGMG | 1260 | ASISRSGTTMYA | 1911 | CARRGLLQWFGAPNSWFDPW |
| 10A-20 | 610 | RTIRTMG | 1261 | ATINSRGITNYA | 1912 | CTTERDGLLWFRELFRPSW |
| 10A-21 | 611 | RSFSFNAMG | 1262 | ARISRFGRTNYA | 1913 | CAKVHSYVWGGHSDYW |
| 10A-22 | 612 | RTYYAMG | 1263 | GAIDWSGRRITYA | 1914 | CARVRFSRLGGVIGRPIDSW |
| 10A-23 | 613 | RAFRRYTMG | 1264 | ASITKFGSTNYA | 1915 | CAKDRGVLWFGELWYW |
| 10A-24 | 614 | RTFSNYRMG | 1265 | ASINRGGSTKYA | 1916 | CASGKGGSATIFHLSRRPLYFDYW |
| 10A-25 | 615 | ITFSPYAMG | 1266 | ATINWSGGYTVY | 1917 | CAKRKNRGPLWFGGGGWGYW |
| | | | | A | | |
| 10A-26 | 616 | RTFSGFTMS | 1267 | AGIITNGSTNYA | 1918 | CARRVAYSSFWSGLRKHMDVW |
| | | STWMG | | | | |
| 10A-27 | 617 | RTFRRYSMG | 1268 | ASITPGGNTNYA | 1919 | CASRRRWLTPYIFW |
| 10A-28 | 618 | SIFSIGMG | 1269 | ARIWWRSGATYY | 1920 | CAAISIFGRLKW |
| | | | | A | | |
| 10A-29 | 619 | RTFTSYRMG | 1270 | AEISSSGGYTYYA | 1921 | CARVGPLRFLAQRPRLRPDYW |
| 10A-30 | 620 | RTFSSFRF | 1271 | ALIFSGGSTYYA | 1922 | CAREWGRWLQRGSYW |
| | | RAMG | | | | |
| 10A-31 | 621 | RTFGSYGMG | 1272 | ATISIGGRTYYA | 1923 | CARGSGSGFMWYHGNNNYDRWR |
| | | | | | | YW |
| 10A-32 | 622 | RTFRSYPMG | 1273 | ASINRGGSTNYA | 1924 | CARGRYDFWSGYYRWFDPW |
| 10A-33 | 623 | RTFSRSDMG | 1274 | AAISWSGGSTSYA | 1925 | CATVPPPRRFLEWLPRRLTYIW |
| 10A-34 | 624 | RTFRRYTMG | 1275 | ASMRGSRSYYA | 1926 | CARMSGFPFLDYW |
| 10A-35 | 625 | SIFRLSTMG | 1276 | ASISSFGSTYYA | 1927 | CARTRGIFLWFGESFDYW |
| 10A-36 | 626 | IAFRIRTMG | 1277 | ASITSGGSTNYA | 1928 | CARGGPRFGGFRGYFDPW |
| 10A-37 | 627 | FTFTSYRMG | 1278 | AGISRFFGTAYYA | 1929 | CARVTRWFGGLDVW |
| 10A-38 | 628 | RTFSRYVMG | 1279 | ASISRFGRTNYA | 1930 | CARHHGLGILWWGTMDVW |
| 10A-39 | 629 | RTFSMG | 1280 | ASISRFGRTNYA | 1931 | CAKRSTWLPQHFDSW |
| 10A-40 | 630 | RTFSTYTMG | 1281 | ARIWRSGGNTYY | 1932 | CARGVRGVFRAYFDHW |
| | | | | A | | |
| 10A-41 | 631 | RNLRMYRMG | 1282 | ALISRVGVTSYA | 1933 | CARGTSFFNFWSGSLGRVGFDSW |
| 10A-42 | 632 | ITIRTHAMG | 1283 | ATISRSGGNTYYA | 1934 | CTTAGVLRYFDWFRRPYW |
| 10A-43 | 633 | RTFRRYHMG | 1284 | AAITSGGRTNYA | 1935 | CTTDGLRYFDWFPWASAFDIW |
| 10A-44 | 634 | RTFRRYTMG | 1285 | AVISWSGGSTKYA | 1936 | CARKGRWSGMNVW |
| 10A-45 | 635 | RTFSWYPMG | 1286 | ASISWGGARTYYA | 1937 | CARSTGPRGSGRYRAHWFDSW |
| 10A-46 | 636 | RTFTSYRMG | 1287 | AAITWNSGRTRYA | 1938 | CSPSSWPFYFGAW |
| 10A-47 | 637 | RPLRRYVMG | 1288 | AAITNGGSTKYA | 1939 | CARGTPWRLLWFGTLGPPPAFDY |
| | | | | | | W |
| 10A-48 | 638 | RTFRRYAMG | 1289 | AAINRSGSTEYA | 1940 | CARQHQDFWTGYYTVW |
| 10A-49 | 639 | RTFRRYTMG | 1290 | ASISRSGTTYYA | 1941 | CAKEGWRWLQLRGGFDYW |
| 10A-50 | 640 | RTLSTYNMG | 1291 | ASISRFGRTNYA | 1942 | CARRGKLSAAMHWFDPW |
| 10A-51 | 641 | RFFSTRVMG | 1292 | ARIWPGGSTYYA | 1943 | CARDRGIFGVSRW |
| 10A-52 | 642 | RFFSICSMG | 1293 | AGINWRSGGSTYY | 1944 | CARGSGWWEYW |
| | | | | A | | |
| 10A-53 | 643 | RMFSSRSNMG | 1294 | ASISSGGTTAYA | 1945 | CARGFGRRFLEWLPRFDYW |
| 10A-54 | 644 | RTFSSARMG | 1295 | AGINMISSTKYA | 1946 | CAHFRRFLPRGYVDYW |
| 10A-55 | 645 | RTFRRYTMG | 1296 | ARIAGGSTYYA | 1947 | CARQQYYDFWSGYFRSGYFDLW |
| 10A-56 | 646 | HTFRNYGMG | 1297 | AAITSSGSTNYA | 1948 | CATVPPPRRFLEWLPRRLTYTW |
| 10A-57 | 647 | RTFSRYAMG | 1298 | ASITKFGSTNYA | 1949 | CAKERESRFLKWRKTDW |
| 10A-58 | 648 | RNLRMYRMG | 1299 | ASISRFGRTNYA | 1950 | CARHDSIGLFRHGMDVW |
| 10A-59 | 649 | RTFRRYAMG | 1300 | ARISSGGSTSYA | 1951 | CARDRGFGFWSGLRGYFDLW |
| 10A-60 | 650 | IPASMYLG | 1301 | AAITSGGRTSYA | 1952 | CAKRKKRGPLWFGGGGWGYW |
| 10A-61 | 651 | IPFRSRT | 1302 | AQITRGGSTNYA | 1953 | CARRHWFGFDYW |
| | | FSAYAMG | | | | |

TABLE 14
Variable Domain Light Chain Sequences

| | SEQ ID | | SEQ ID | | SEQ ID | |
|---|---|---|---|---|---|---|
| Variant | NO | CDRL1 | NO | CDRL2 | NO | CDRL3 |
| 2A-1 | 1954 | RASQSIHRFLN | 2040 | AASNLHS | 2126 | CQQSYGLPPTF |
| 2A-2 | 1955 | RASQTINTYLN | 2041 | SASTLQS | 2127 | CQQSYSTFTF |
| 2A-3 | 1956 | RASQNIHTYLN | 2042 | AASTFAK | 2128 | CQQSYSAPPYTF |
| 2A-4 | 1957 | RASQSIDTYLN | 2043 | AASALAS | 2129 | CQQSYSAPPYTF |
| 2A-5 | 1958 | RASQSIHTYLN | 2044 | AASALAS | 2130 | CQQSYSAPPYTF |
| 2A-6 | 1959 | RASQSIDTYLN | 2045 | AASALAS | 2131 | CQQSYSAPPYTF |
| 2A-7 | 1960 | RASQSIDTYLN | 2046 | AASALAS | 2132 | CQQSYSAPPYTF |
| 2A-8 | 1961 | RASQSIDTYLN | 2047 | AASALAS | 2133 | CQQSYSAPPYTF |
| 2A-9 | 1962 | RASQRIGTYLN | 2048 | AASNLEG | 2134 | CQQNYSTTWTF |
| 2A-10 | 1963 | RASQSIHISLN | 2049 | LASPLAS | 2135 | CQQSYSAPPYTF |
| 2A-11 | 1964 | RASQSIGNYLN | 2050 | GVSSLQS | 2136 | CQQSHSAPLTF |
| 2A-12 | 1965 | RASQSIDNYLN | 2051 | GVSALQS | 2137 | CQQSHSAPPYFF |
| 2A-13 | 1966 | RASQSIDTYLN | 2052 | GASALES | 2138 | CQQSHSAPPYFF |
| 2A-14 | 1967 | RASQSIDTYLN | 2053 | GVSALQS | 2139 | CQQSYSAPPYFF |
| 2A-15 | 1968 | RASQSIDNYLN | 2054 | GVSALQS | 2140 | CQQSHSAPLTF |
| 3A-1 | 1969 | RASQTIYSYLN | 2055 | ATSTLQG | 2141 | CQHRGTF |
| 3A-2 | 1970 | RTSQSINTYLN | 2056 | GASNVQS | 2142 | CQQSYRIPRTF |
| 3A-3 | 1971 | RASRSISRYLN | 2057 | AASSLQA | 2143 | CQQSYSSLLTF |
| 3A-4 | 1972 | RASRSIRRYLN | 2058 | ASSSLQA | 2144 | CQQSYSTLLTF |
| 3A-5 | 1973 | RASQSIGRYLN | 2059 | AASSLKS | 2145 | CQQSYSLPRTF |
| 3A-6 | 1974 | RASQSIGKYLN | 2060 | ASSSLQS | 2146 | CQQSYSPPFTF |
| 3A-7 | 1975 | RASQSIGRYLN | 2061 | ASSSLQS | 2147 | CQQSYSLPRTF |
| 3A-8 | 1976 | RASQSIGRYLN | 2062 | AASSLKS | 2148 | CQQSYSLPLTF |
| 3A-9 | 1977 | RASQSIGRYLN | 2063 | AASSLKS | 2149 | CQQSYSLPRTF |
| 3A-10 | 1978 | RASQSIRKYLN | 2064 | ASSTLQR | 2150 | CQQSLSTPFTF |
| 3A-11 | 1979 | RASQSIGKYLN | 2065 | ASSTLQR | 2151 | CQQSLSPPFTF |
| 3A-12 | 1980 | RASQSIGKYLN | 2066 | ASSTLQR | 2152 | CQQSLSTPFTF |
| 3A-13 | 1981 | RASQSIGKYLN | 2067 | ASSTLQR | 2153 | CQQSFSPPFTF |
| 3A-14 | 1982 | RASQSIGKYLN | 2068 | ASSTLQR | 2154 | CQQSFSTPFTF |
| 3A-15 | 1983 | RASQNIKTYLN | 2069 | AASKLQS | 2155 | CQQSYSTSPTF |
| 2A-1 | 1984 | RASQSIHRFLN | 2070 | AASNLHS | 2156 | CQQSYGLPPTF |
| 2A-10 | 1985 | RASQSIHISLN | 2071 | LASPLAS | 2157 | CQQSYSAPPYTF |
| 2A-5 | 1986 | RASQSIHTYLN | 2072 | AASALAS | 2158 | CQQSYSAPPYTF |
| 2A-2 | 1987 | RASQTINTYLN | 2073 | SASTLQS | 2159 | CQQSYSTFTF |
| 2A-4 | 1988 | RASQSIDTYLN | 2074 | AASALAS | 2160 | CQQSYSAPPYTF |
| 2A-6 | 1989 | RASQSIGNYLN | 2075 | GVSSLQS | 2161 | CQQSHSAPLTF |
| 2A-11 | 1990 | RASQSIDTYLN | 2076 | AASALAS | 2162 | CQQSYSAPPYTF |
| 2A-12 | 1991 | RASQSIDNYLN | 2077 | GVSALQS | 2163 | CQQSHSAPPYFF |
| 2A-13 | 1992 | RASQSIDTYLN | 2078 | GASALES | 2164 | CQQSHSAPPYFF |
| 2A-14 | 1993 | RASQSIDTYLN | 2079 | AASALAS | 2165 | CQQSYSAPPYTF |
| 2A-7 | 1994 | RASQSIDTYLN | 2080 | GVSALQS | 2166 | CQQSYSAPPYFF |
| 2A-8 | 1995 | RASQSIDTYLN | 2081 | AASALAS | 2167 | CQQSYSAPPYTF |
| 2A-15 | 1996 | RASQSIDNYLN | 2082 | GVSALQS | 2168 | CQQSHSAPLTF |
| 2A-9 | 1997 | RASQRIGTYLN | 2083 | AASNLEG | 2169 | CQQNYSTTWTF |
| 2A-16 | 1998 | TGTSSDVGSYDLVS | 2084 | EGNKRPS | 2170 | CCSYAGSSVVF |
| 2A-17 | 1999 | TGTSSDVGSSNLVS | 2085 | EGSKRPS | 2171 | CCSYAGSLYVF |
| 2A-18 | 2000 | TGTSSDIGSYNLVS | 2086 | EGTKRPS | 2172 | CCSYAGSRTYVF |
| 2A-19 | 2001 | TGTSTDVGSYNLVS | 2087 | EGTKRPS | 2173 | CCSYAGSYTSVVF |
| 2A-2 | 2002 | TGTSSNVGSYNLVS | 2088 | EGTKRPS | 2174 | CCSYAGSSSFVVF |
| 2A-21 | 2003 | RASQSIHTYLN | 2089 | AASALAS | 2175 | CQQSYSAPPYTF |
| 2A-22 | 2004 | RASQSIHTYLN | 2090 | AASALAS | 2176 | CQQSYSAPPYTF |
| 2A-23 | 2005 | RASQTINTFLN | 2091 | SASTLQS | 2177 | CQQSYSTFTF |
| 2A-24 | 2006 | RASQTIRTYLN | 2092 | DASTLQR | 2178 | CQQSYRTPPWTF |
| 2A-25 | 2007 | RSSQSISSYLN | 2093 | GASRLRS | 2179 | CQQGYSAPWTF |
| 2A-26 | 2008 | RASQSISGSLN | 2094 | AESRLHS | 2180 | CQQSYSPPQTF |
| 2A-27 | 2009 | RASRSISTYLN | 2095 | AASNLQG | 2181 | CQQSHSIPRTF |
| 2A-28 | 2010 | RASQSIHTYLN | 2096 | AASALAS | 2182 | CQQSYSAPPYTF |
| 3A-10 | 2011 | RASQSIRKYLN | 2097 | ASSTLQR | 2183 | CQQSLSTPFTF |
| 3A-4 | 2012 | RASQNIKTYLN | 2098 | AASKLQS | 2184 | CQQSYSTSPTF |
| 3A-7 | 2013 | RASQTIYSYLN | 2099 | ATSTLQG | 2185 | CQHRGTF |
| 3A-1 | 2014 | RASRSIRRYLN | 2100 | ASSSLQA | 2186 | CQQSYSTLLTF |
| 3A-5 | 2015 | RASQSIGKYLN | 2101 | ASSSLQS | 2187 | CQQSYSPPFTF |
| 3A-6 | 2016 | RASRSISRYLN | 2102 | AASSLQA | 2188 | CQQSYSSLLTF |
| 3A-15 | 2017 | RASQSIGKYLN | 2103 | ASSTLQR | 2189 | CQQSLSPPFTF |
| 3A-3 | 2018 | RASQSIGRYLN | 2104 | ASSSLQS | 2190 | CQQSYSLPRTF |
| 3A-11 | 2019 | RASQSIGRYLN | 2105 | AASSLKS | 2191 | CQQSYSLPRTF |
| 3A-8 | 2020 | RASQSIGKYLN | 2106 | ASSTLQR | 2192 | CQQSLSTPFTF |
| 3A-2 | 2021 | RASQSIGRYLN | 2107 | AASSLKS | 2193 | CQQSYSLPLTF |
| 3A-12 | 2022 | RTSQSINTYLN | 2108 | GASNVQS | 2194 | CQQSYRIPRTF |
| 3A-14 | 2023 | RASQSIGKYLN | 2109 | ASSTLQR | 2195 | CQQSFSPPFTF |
| 3A-9 | 2024 | RASQSIGKYLN | 2110 | ASSTLQR | 2196 | CQQSFSTPFTF |
| 3A-13 | 2025 | RASQSIGRYLN | 2111 | AASSLKS | 2197 | CQQSYSLPRTF |
| 3A-16 | 2026 | RASQIIGSYLN | 2112 | TTSNLQS | 2198 | CQQSYITPWTF |
| 3A-17 | 2027 | RASQSISRYIN | 2113 | EASSLES | 2199 | CQQSHITPLTF |
| 3A-18 | 2028 | RASQSIYTYLN | 2114 | SASNLHS | 2200 | CQQSDTTPWTF |
| 3A-19 | 2029 | RASQSIATYLN | 2115 | GASSLEG | 2201 | CQQTFSSPFTF |
| 3A-2 | 2030 | RASQNINTYLN | 2116 | SASSLQS | 2202 | CQQSSLTPWTF |
| 3A-21 | 2031 | RASQGIATYLN | 2117 | YASNLQS | 2203 | CQQSYSTRFTF |
| 3A-22 | 2032 | RASERISNYLN | 12118 | TASNLES | 2204 | CQQSYTPPRTF |
| 3A-23 | 2033 | RASQSISSSLN | 2119 | AASRLQD | 2205 | CQQSYSTPRSF |
| 3A-24 | 2034 | RASQSISSHLN | 2120 | RASTLQS | 2206 | CQQTYNTPQTF |
| 3A-25 | 2035 | RASQSISSYLI | 2121 | AASRLHS | 2207 | CQQGYNTPRTF |
| 3A-26 | 2036 | RASPSISTYLN | 2122 | TASRLQT | 2208 | CQQTYSTPSSF |
| 3A-27 | 2037 | RASQNIAKYLN | 2123 | GASGLQS | 2209 | CQQSHSPPITF |
| 3A-28 | 2038 | RASQSIGTYLN | 2124 | AASNLHS | 2210 | CQESYSAPYTF |
| 3A-29 | 2039 | RASQSISPYLN | 2125 | KASSLQS | 2211 | CQQSSSTPYTF |

TABLE 15
Variable Domain Heavy Chain Sequences

| | SEQ | |
|---|---|---|
| | ID | |
| Variant | NO | Sequence |
| 1-1 | 2212 | EVQLLESGGGLVQPGGSLRLSCAASGFTFSSYAMNWVRQAPGKGLEWVSAISGSGVSTYY |
| | | ADSVKGRFTISRDNSKNTLYLQMNSLRAEDTAVYYCAKGDSGSYYGSSYFDYWGQGTLV |
| | | TVSS |
| 1-2 | 2213 | EVQLLESGGGLVQPGGSLRLSCAASGFTFSSYGMSWVRQAPGKGLEWVSAISGSGGNTYY |
| | | ADSVKGRFTISRDNSKNTLYLQMNSLRAEDTAVYYCTRVRRGSGVAPYSSSWGRYYFDY |
| | | WGQGTLVTVSS |
| 1-3 | 2214 | EVQLLESGGGLVQPGGSLRLSCAASGFRFSSYSMSWVRQAPGKGLEWVSAISGSGGSSYY |
| | | ADSVKGRFTISRDNSKNTLYLQMNSLRAEDTAVYYCAKDGSGTIFGVVIAKYYFDYWGQ |
| | | GTLVTVSS |
| 1-4 | 2215 | EVQLLESGGGLVQPGGSLRLSCAASGFTFSAYAMSWVRQAPGKGLEWVSAISGSGGSTHY |
| | | ADSVKGRFTISRDNSKNTLYLQNSLRAEDTAVYYCASWGPLWSGSPNDAFDIWGQGTLV |
| | | TVSS |
| 1-5 | 2216 | EVQLLESGGGLVQPGGSLRLSCAASGFFSSYAMGWVRQAPGKGLEWVSAISGSGYSTYY |
| | | ADSVKGRFTISRDNSKNTLYLQMNSLRAEDTAVYYCARVRSYDSTAYDEPLDALDIWGQ |
| | | GTLVTVSS |
| 1-6 | 2217 | EVQLLESGGGLVQPGGSLRLSCAASGFTFSSFAMSWVRQAPGKGLEWVSAISGSGVSTYY |
| | | ADSVKGRFTISRDNSKNTLYLQMNSLRAEDTAVYYCGRDARSSGYNGYDLFDIWGQGTL |
| | | VTVSS |
| 1-7 | 2218 | EVQLLESGGGLVQPGGSLRLSCAASGFTFSAYAMSWRQAPGKGLEWVSAISGSGGSYYA |
| | | DSVKGRFTISRDNSKNTLYLQMNSLRAEDTAVYYCAKGPLVGWYFDLWGQGTLVTVSS |
| 1-8 | 2219 | EVQLLESGGGLVQPGGSLRLSCAASGFTFGSYAMSWVRQAPGKGLEWVSLISGSGGSTYY |
| | | ADSVKGRFTISRDNSKNTLYLQMNSLRAEDTAVYYCASWGPLWSGSPNDAFDIWGQGTL |
| | | VTVSS |
| 1-9 | 2220 | EVQLLESGGGLVQPGGSLRLSCAASGFTFSAYAMSWVRQAPGKGLEWVSAISGSGGSTFY |
| | | ADSVKGRFTISRDNSKNTLYLQMNSLRAEDTAVYYCTRQGDSSGWYDGWFDPWGQGTL |
| | | VTVSS |
| 1-10 | 2221 | EVQLLESGGGLVQPGGSLRLSCAASGFIFSSYAMSWVRQAPGKGLEWVSIISGSGGSTYYA |
| | | DSVKGRFTISRDNSKNTLYLQMNSLRAEDTAVYYCIATVVSPLDYWGQGTLVTVSS |
| 1-11 | 2222 | EVQLLESGGGLVQPGGSLRLSCAASGFTFSDYAMSWVRQAPGKGLEWVSTISGSGGSTYY |
| | | ADSVKGRFTISRDNSKNTLYLQMNSLRAEDTAVYYCARDESSSSLNWFDPWGQGTLVTV |
| | | SS |
| 1-12 | 2223 | EVQLLESGGGLVQPGGSLRLSCAASGFTFSSYAMIWVRQAPGKGLEWVSAISGSAGSTYY |
| | | ADSVKGRFTISRDNSKNTLYLQMNSLRAEDTAVYYCASPDPLGSVADLDYWGQGTLVTV |
| | | SS |
| 1-13 | 2224 | EVQLLESGGGLVQPGGSLRLSCAASGFTFGSYAMSWVRQAPGKGLEWVSAISGSGGTTY |
| | | YADSVKGRFTISRDNSKNTLYLQMNSLRAEDTAVYYCARVWSSSSVFDYWGQGTLVTVS |
| | | S |
| 1-14 | 2225 | EVQLLESGGGLVQPGGSLRLSCAASGFTFSRYAMSWRQAPGKGLEWVSAISGSGASTYYA |
| | | DSVKGRFTISRDNKNTLYLQMNSLRAEDTAVYYCAKDRGGGSYYGTFDYWGQGTLVTV |
| | | SS |
| 1-15 | 2226 | EVQLLESGGGLVQPGGSLRLSCAASGSTFSSYAMSWVRQAPGKGLEWVSAISGSGATYYA |
| | | DSVKGRFTISRDNSKNTLYLQMNSLRAEDTAVYYCTRVRVAGYSSSWYDAFDIWGQGTL |
| | | VTVSS |
| 1-16 | 2227 | EVQLLESGGGLVQPGGSLRLSCAASGFTFSSYAMTWVRQAPGKGLEWVSAISGSGGNTY |
| | | YADSVKGRFTISRDNSKNTLYLQMNSLRAEDTAVYYCVKGTIPIFGVIRSAFDYWGQGTL |
| | | VTVSS |
| 1-17 | 2228 | EVQLLESGGGLVQPGGSLRLSCAASGFTFSSYVMSWVRQAPGKGLEWVSSISGSGGSTYY |
| | | ADSVKGRFTISRDNSKNTLYLQMNSLRAEDTAVYYCARGSGSYSFFDYWGQGTLVTVSS |
| 1-18 | 2229 | EVQLLESGGGLVQPGGSLRLSCAASGFTFSSYANWVRQAPGKGLEWVSAISGSGVSTYYA |
| | | DSVKGRFTISRDNSKNTLYLQMNSLRAEDTAVYYCATTPGPWIQLWFGGGFDYWGQGTL |
| | | VTVSS |
| 1-19 | 2230 | EVQLLESGGGLVQPGGSLRLSCAASGFTFSSYDMSWVRQAPGKGLEWVSAISGSAGSTTM |
| | | RDSVKGRFTISRDNSKNTLYLQMNSLRAEDTAVYYCAKDGLVVAGTFDYWGQGTLVTVS |
| | | S |
| 1-20 | 2231 | EVQLLESGGGLVQPGGSLRLSCAASGFTFSGYAMSWVRQAPGKGLEWVSALSGSGGSTY |
| | | YADSVKGRFTISRDNSKNTLYLQMNSLRAEDTAVYYCARGALLEWLSRFDNWGQGTLVT |
| | | VSS |
| 1-21 | 2232 | EVQLLESGGGLVQPGGSLRLSCAASGFTLSSYAMSWVRQAPGKGLEWVSAISGSGGTTYY |
| | | ADSVKGFTISRDNSKNTLYLQMNSLRAEDTAVYYCARDLGAADLIDYWGQGTLVTVSS |
| 1-22 | 2233 | EVQLLESGGGLVQPGGSLRLSCAASGFIFSSYAMSWVRQAPGKGLEWISAISGSGGTYYA |
| | | DSVKGRFTISRDNSKNTLYLQMNSPRAEDTAVYYCVRVPAAAGKGVPGIFDIWGQGTLVT |
| | | VSS |
| 1-23 | 2234 | EVQLLESGGGLVQPGGSLRLSCAASGFTFSSYAMGWVRQAPGKGLEWVSAIRGSGGSTY |
| | | YADSVKGRFTISRDNSKNTLYLQMNSLRAEDTAVYYCARVRQGLRRTWYYFDYWGQGT |
| | | LVTVSS |
| 1-24 | 2235 | EVQLLESGGGLVQPGGSLRLSCAASGSTFSSYAMSWVRQAPGKGLEWVSAIGGSGGSTYY |
| | | ADSVKGRFTISRDNSKNTLYLQMNSLRAEDTAVYYCAKEYSSSWFDPWGQGTLVTVSS |
| 1-25 | 2236 | EVQLLESGGGLVQPGGSLSCAASGFTFSSYTMSWVRQAPGKGLEWVSAISVSGGSTYYAD |
| | | SVKGRFTISRDNSKNTLYLQMNSLRAEDTAVYYCAKREDYDFWSGRGAFDIWGQGTLVT |
| | | IS |
| 1-26 | 2237 | EVQLLESGGGLVQPGGSLRLSCAASGFTFSSYAMYWVRQAPGKGLEWVSAISGSGGTYY |
| | | ADSVKGRFTISRDNSKNTLYLQMNSLRAEDTAVYYCAKDIGYSSSWSFDYWGQGTLVTV |
| | | SS |
| 1-27 | 2238 | EVQLLESGGGLVQPGGSLRLSCAASGFTFRSYAMSWVRQAPGKGLEWVSAISGSGRSTYY |
| | | ASVKGRFTISRDNSKNTLYLQMNSLRAEDTAVYYCARDDYSDYRPFDYWGQGTLVTVSS |
| 1-28 | 2239 | EVQLLESGGGLVQPGGSLRLSCAASGFTFSSYTMSWVRQAPGKGLEWVSAISGSGGSIYY |
| | | ADSVKGRFTISRDNSKNTLYLQMNSLRAEDTAVYYCAHRPSLQWLDWWFDPWGQGTLV |
| | | TVSS |
| 1-29 | 2240 | EVQLLESGGGLVQPGGSLRLSCAASGFTFSSQAMSWVRQAPGKGLEWVSIISGSGGSTYY |
| | | ADSVKGRFTISRDNSKNTLYLQMNSLRAEDTAVYYCAKDGASGWPNWHFDLWGQGTLV |
| | | TVSS |
| 1-30 | 2241 | EVQLLESGGGLVQPGGSLRLSCAASGFTFSSYPMSWVRQAPGKGLEWVSAISGSGGRTYY |
| | | ADSVKGRFTISRDNSKNTLYLQMNSLRAEDTAVYYCAKGAAAGPFDYWGQGTLVTVSS |
| 1-31 | 2242 | EVQLLESGGGLVQPGGSLRLSCAASGFTFSSYAMTWVRQAPGKGLEWVSAISGGTTYYA |
| | | DSVKGRFTISRDNSKNTLYLQMNSLRAEDTAVYYCAKEEYYYDSSGPNWFDPWGQGTLV |
| | | TVSS |
| 1-32 | 2243 | EVQLLESGGGLVQPGGSLRLSCAASGFTFSSYAMSWVRQAPGKGLEWVTAISVSGGSTYY |
| | | ADSVKGRFTISRDNSKNTLYLQNSLKTQETAGYYWAPQGGTTVPTGRFDPWGQRTLVTV |
| | | SS |
| 1-33 | 2244 | EVQLLESGGGLVQPGGSLRLSCAASGFTFSSYAMSWVRQAPGKGLEWVSAISGSSGSTYY |
| | | ADSVKGRFTISRDNSKNTLYLQMNSLRAEDTAVYYCSRGGGPAAGFHGLDVWGQGTLVT |
| | | VSS |
| 1-34 | 2245 | EVQLLESGGGLVQPGGSLRLSCAASGFTFSSYAVSWVRQAPGKGLEWVSAISASGGSTYY |
| | | ADSVKGRFTISRDNSKNTLYLQMNSLRAEDTAVYYCARAAKRQQLFPRNYFDYWGQGTL |
| | | VTVSS |
| 1-35 | 2246 | EVQLLESGGGLVQPGGSLRLSCAASGFTFSSYPMSWVRQAPGKGLEWVSAIRGSGGSTYY |
| | | ADSVKGRFTISRDNSKNTLYLQMNSLRAEDTAVYYCALHYGSGRSFDYWGQGTLVTVSS |
| 1-36 | 2247 | EVQLLESGGGLVQPGGSLRLSCAASGFTFSSYGMSWVRQAPGKGLEWVSAISGSGGATYY |
| | | ADSVKGRFTISRDNSKNTLYLQMNSLRAEDTAVYYCARPGGRIVGALWGAFDYWGQGTL |
| | | VTVSS |
| 3-1 | 2248 | EVQLVESGGGLVQPGGSLRLSCAASGRTFCRYSMGWFRQAPGKERELVATWRPANTNYA |
| | | DSVKGRFTISADNSKNTAYLQMNSLKPEDTAVYYCAKNWGDAGTTWFEKSGWGQGTLV |
| | | TSS |
| 3-2 | 2249 | EVQLVESGGGLVQPGGSLRLSCAASGNIFSRYIMGWFRQAPGKERELVAAISRTGGSTYY |
| | | ADSVKGRFTISADNSKNTAYLQMNSLKPEDTAVYYCAIDPDGEWGQGTLVTVSS |
| 3-3 | 2250 | EVQLVESGGGLVQPGGSLRLSCAASGRTLAGYTMGWFRQAPGKERELLAEIYPSGNGVY |
| | | YADSVKGRFTISADNSKNTAYLQMNSLKPEDTAVYYCAADVRDSIWRSWGQGTLVTVSS |
| 3-4 | 2251 | EVQLVESGGGLVQPGGSLRLSCAASGSTLSRYSMGWFRQAPGKEREFVAAIARRERVYAD |
| | | SVKGRFTISADNSKNTAYLQMNSLKPEDTAVYYCARLSCHDYSCYSAFDFWGQGTLVTV |
| | | SS |
| 3-5 | 2252 | EVQLVESGGGLVQPGGSLRLSCAASGSIFSSAAMGWFRQAPGKEREFEAISWRTGTTYYA |
| | | DSVKGRFTISADNSKNTAYLQMNSLKPEDTAVYYCAAAGSMGWNHLRDYDWGQGTLVT |
| 3-6 | 2253 | EVQLVESGGGLVQPGGSLRLSCAATFSGYLMGWFRQAPGKEREFVAGIWRSGVSLYYAD |
| | | SVKGRFTISADNSKNTAYLQMNSLKPEDTAVYYCAARSGWGAAMRSADFRWGQGTLVT |
| | | VSS |
| 3-7 | 2254 | EVQLVESGGGLVQPGGSLRLSCAASGRTFSSYDMGWFRQAPGKERERVAIIKSDGSTYYA |
| | | DSVKGRFTISADNSKNTAYLQMNSLKPEDTAVYYCARSPRFSGVVVRPGLDLWGQGTLV |
| | | TVSS |
| 3-8 | 2255 | EVQLVESGGGLVQPGGSLRLSCAASGSISSYFMGWFRQAPGKEREWVSSIGIAGTPTLYAD |
| | | SVKGRFTISADNSKNTAYLQMNSLKPEDTAVYYCAACSDYYCSGVGAVWGQGTLVTVSS |
| 3-9 | 2256 | EVQLVESGGGLVQPGGSLRLSCAASGPTFSTYAMGWFRQAPGKEREFVAAVINGGTTNY |
| | | ADSVKGRFTISADNSKNTAYLQMNSLKPEDTAVYYCAKDSWDSSGYSYHYYYYGMDVW |
| | | GQGTLVTVSS |
| 3-10 | 2257 | EVQLVESGGGLVQPGGSLRLSCAASGIIGSFRTMGWFRQAPGKERELAGFTGSGRSQYYA |
| | | DSVKGRFTISADNSKNTAYLQMNSLKPEDTAVYYCARGDIAVIQVLDYWGQGTLVTVSS |
| 3-11 | 2258 | EVQLVESGGGLVQPGGSLRLSCAASGGTFASYGMGWFRQAPGKEREWVAGIWEDSSAA |
| | | HYAESVKGRFTISADNSKNTAYLQMNSLKPEDTAVYYCAYSGIGTDWGQGTLVTVSS |
| 3-12 | 2259 | EVQLVESGGGLVQPGGSLRLSCAASGLTFRNYAMGWFRQAPGKERELVAGITSGGTRNY |
| | | ADSVKGRFTISADNSKNTAYLQMNSLKPEDTAVYYCAAGWGDSAWGQGTLVTVSS |
| 3-13 | 2260 | EVQLVESGGGLVQPGGSLRLSCAASGSISTIKVMGWFRQAPGKEREFVAAISWGGGLTVY |
| | | ADSVKGRFTISADNSKNTAYLQMNSLKPEDTAVYYCAAFDGYTGSDWGQGTLVTVSS |
| 3-14 | 2261 | EVQLVESGGGLVQPGGSLRLSCAASGGTLSSYIGWFRQAPGKERELVATVRSGSITNYADS |
| | | VKGRFTISADNSKNTAYLQMNSLKPEDTAVYYCAADLTDIWEGIREYDEYAWGQGTLVT |
| | | VSS |
| 3-15 | 2262 | EVQLVESGGGLVQPGGSLRLSCAASGRTFRRYPMGWFRQAPGKEREFVVAVTWSGGSTY |
| | | YADSVKGRFTISADNSKNTAYLQMNSLKPEDTAVYYCAAGLRGRQYSWGQGTLVTVSS |
| 3-16 | 2263 | EVQLVESGGGLVQPGGSLRLSCAASGSTFSIDVMGWFRQAPGKEREFVAAISWSGESTLY |
| | | ADSVKGRFTISADNSKNTAYLQMNSLKPEDTAVYYCAAFDGYSGSDWGQGTLVTVSS |
| 3-17 | 2264 | EVQLVESGGGLVQPGGSLRLSCAASGRTSSSAVMGWFRQAPGKEREFVAAINRGGSTIYV |
| | | DSVKGRFTISADNSKNTAYLQMNSLKPEDTAVYYCATGPYRSYFARSYLWGQGTLVTVS |
| | | S |
| 3-18 | 2265 | EVQLVESGGGLVQPGGSLRLSCAASGGTFSSYRMGWFRQAPGKEREWVSAISWNDGGAD |
| | | YADSVKGRFTISADNSKNTAYLQMNSLKPEDTAVYYCAATQWGSSGWKQARWYDWGQ |
| | | GTLVTVSS |
| 3-19 | 2266 | EVQLVESGGGLVQPGGSLRLSCAASGTIFASAMGWFRQAPGKERELVAFSSSGGSTYYAD |
| | | SVKGRFTISADNSKNTAYLQMNSLKPEDTAVYYCAKDPIAAADPGDSVSFDYWGQGTLV |
| | | TVSS |
| 3-20 | 2267 | EVQLVESGGGLVQPGGSLRLSCAASGFGIDAMGWFRQAPGKEREFVATITEGGATNVGST |
| | | SYSVKGRFTISADNSKNTAYLQMNSLKPEDTAVYYCALNVWRTSSDWGQGTLVTVSS |
| 3-21 | 2268 | EVQLVESGGGLVQPGGSLRLSCAASGNIIGGNHMGWFRQAPGKEREFVGAITSSRSTVYA |
| | | DSVKGRFTISADNSKNTAYLQMNSLKPEDTAVYYCAAVTTQTYGYDWGQGTLVTVSS |
| 3-22 | 2269 | EVQLVESGGGLVQPGGSLRLSCAASGRTFSRYDMGWFRQAPGKEREFVGGTRSGSTNYA |
| | | DSVKGRFTISADNSKNTAYLQMNSLKPEDTAVYYCARHSDYSGLSNFDYWGQGTLVTVS |
| | | S |
| 3-23 | 2270 | EVQLVESGGGLVQPGGSLRLSCAAGRQPAPELRGYGMGWFRQAPGKEREFVAAVIGSSG |
| | | TTYYADSVKGRFTISADNSKNTAYLQMNSLKPEDTAVYYCAKAKATVGLRAPFDYWGQ |
| | | GTLVTVSS |
| 3-24 | 2271 | EVQLVESGGGLVQPGGSLRLSCAASGINFSRYGMGWFRQAPGKEREFVASITYLGRTNYA |
| | | DSVKGRFTISADNSKNTAYLQMNSLKPEDTAVYYCALRVRPYGQYDWGQGTLVTVSS |
| 3-25 | 2272 | YADSVKGRFTISADNSKNTAYLQMNSLKPEDTAVYYCAVSKPLNYYTYYDARRYDWGQ |
| | | GTLVTVSS |
| 3-26 | 2273 | EVQLVESGGGLVQPGGSLRLSCAASGGTFGHYAMGWFRQAPGKEREFVAAVSWSGSSTY |
| | | YADSVKGRFTISADNSKNTAYLQMNSLKPEDTAVYYCAVSQPLNYYTYYDARRYDWGQ |
| | | GTLVTVSS |
| 3-27 | 2274 | EVQLVESGGGLVQPGGSLRLSCAASGFTLDDYAMGWFRQAPGKEREFVAAISWSTGSTY |
| | | YADSVKGRFTISADNSKNTAYLQMNSLKPEDTAVYYCAASQAPITIATMMKPFYDWGQG |
| | | TLVTVS |
| 3-28 | 2275 | EVQLVESGGGLVQPGGSLRLSCAASGFTFRRYDMGWFRQAPGKEREFVSAISGGLAYYA |
| | | DSVKGRFTISADNSKNTAYLQMNSLKPEDTAVYYCAVDLSGDAVYDWGQGTLVTVSS |
| 3-29 | 2276 | EVQLVESGGGLVQPGGSLRLSCAASGINFSRNAMGWFRQAPGKERELVASITHQDRPIYA |
| | | DSEKGLFTITEDNKKNTDHLMMNLLKPEDTAVYYCALPVGPYGQYDWGQGTLVTWS |
| 3-30 | 2277 | DSVKGRFTISADNSKNTAYLQMNSLKPEDTAVYYCALRVRPYGQYDWGQGTLVTVSS |
| 3-31 | 2278 | EVQLVESGGGLVQPGGSLRLSCAASGSTFSINAMGWFRQAPGKEREFVAGITSSGGYTNY |
| | | ADSVKGRFTISADNSKNTAYLQMNSLKPEDTAVYYCAADGVPEYSDYASGPVWGQGTLV |
| | | TVSS |
| 7-1 | 2279 | EVQLLESGGGLVQPGGSLRLSCAASGFTFSNYAMRWVRQAPGKGLEWVSAISGSGGSTY |
| | | YADSVRGRFTISRDNSKNTLYLQMNSLRAEDTAVYYCARHTGRYSSGSTGWFHYWGQGT |
| | | LVTVSS |
| 7-2 | 2280 | EVQLVESGGGLVQPGGSLRLSCAASGFAFSRHAMSWFRQAPGKEREFVSDIGGSGSTTYY |
| | | ADSVKGRFTISADNSKNTAYLQMNSLKPEDTAVYYCARTTFDNWFDPWGQGTLVTVSS |
| 7-3 | 2281 | EVQLVESGGGLVQPGGSLRLSCAASGRTFSINAMGWFRQAPGKEREFVAGITRSAVSTITS |
| | | EGTANYADSVKGRFTISADNSKNTAYLQMNSLKPEDTAVYYCAADGVPEYSDYASGPVW |
| | | GQGTLVTVSS |
| 7-4 | 2282 | EVQLLESGGGLVQPGESLRLSCAASGFTFSSYGMNWVRQAPGKGLEWVSASSGSGGSTY |
| | | YADSVKGRFTISRDNSKNTLYLQMNSLRAEDTAYYCARREYIESGFDSWGQGTLVTVSS |
| 7-5 | 2283 | EVQLVESGGGLVQPGGSLRLSCAASGRTFSTDAMGWFRQAPGKEREFVAAISSGGSTNYA |
| | | DSVKGRFTISADNSKNTAYLQMNSLKPEDTAVYYCAATRGRSTRLVLPSLVEWGQGTLV |
| | | TVSS |
| 7-6 | 2284 | EVQLVESGGGLVQPGGSLRLSCAASGRIFYPMGWFRQAPGKEREFVAAVRWSSTGIYYTQ |
| | | YADSVKGRFTISADNSKNTAYLQMNSLKPEDTAVYYCAAALSEVWRGSENLREGYDWG |
| | | QGTLVTVSS |
| 7-7 | 2285 | EVQLVESGGGLVQPGGSLRLSCAASGFTFGSYDMGWFRQAPGKEREFVTAINWSGARTA |
| | | YADSVKGRFTISADNSKNTAYLQMNSLKPEDTAVYYCAARSVYSYEYNWGQGTLVTVSS |
| 7-8 | 2286 | EVQLVESGGGLVQPGGSLRLSCAASGSTFTINAMGWFRQAPGKEREFVSGISHNGGTTNY |
| | | ADSVKGRFTISADNSKNTAYLQMNSLKPEDTAVYYCAADGVPEYSDYASGPVWGQGTLV |
| | | TVSS |
| 7-9 | 2287 | EVQLVESGGGLVQPGGSLRLSCAASGGTFSSIGMGWFRQAPGKEREFVAAISWDGGATAY |
| | | ADSVKGRFTISADNSKNTAYLQMNSLKPEDTAVYYCAKEDVGKPFDWGQGTLVTVSS |
| 7-10 | 2288 | EVQLVESGGGLVQPGGSLRLSCAASGRTYAMGWFRQAPGKEREFVAEINWSGSSTYYAD |
| | | SVKGRFTISADNSKNTAYLQMNSLKPEDTAVYYCAVDGPFGWGQGTLVTVSS |
| 7-11 | 2289 | EVQLVESGGGLVQPGGSLRLSCAASGLPFSTKSMGWFRQAPGKEREFVAAIHWSGLTSYA |
| | | DSVKGRFTISADNSKNTAYLQMNSLKPEDTAVYYCAADRAADFFAQRDEYDWGQGTLV |
| | | TVSS |
| 7-12 | 2290 | EVQLVESGGGLVQPGGSLRLSCAASGRTIVPYTMGWFRQAPGKEREFVAAISPSAFTEYA |
| | | DSVKGRFTISADNSKNTAYLQMNSLKPEDTAVYYCAARRWGYDWGQGTLVTVSS |
| 7-13 | 2291 | EVQLVESGGGLVQPGGSLRLSCAASGLRLNMHRMGWFRQAPGKEREFVAAISGWSGGTN |
| | | YADSVKGRFTISADNSKNTAYLQMNSLKPEDTAVYYCAKIGTLWWGQGTLVTVSS |
| 7-14 | 2292 | EVQLVESGGGLVQPGGSLRLSCAASGSTFSINAMGWFRQAPGKEREFVAGISRGGTTNYA |
| | | DSVKGRFTISADNSKNTAYLQMNSLKPEDTAVYYCAADGVPEYSDYASGPVWGQGTLVT |
| | | VSS |
| 7-15 | 2293 | EVQLVESGGGLVQPGGSLRLSCAASGSTLPYHAMGWFRQAPGKEREFVASISRFFGTAYY |
| | | ADSVKGRFTISADNSKNTAYLQMNSLKPEDTAVYYCAPTFAAGASEYHWGQGTLVTVSS |
| 7-16 | 2294 | EVQLVESGGGLVQPGGSLRLSCAASGFTFTSYAISWFRQAPGKEREFVSAISGSGGSTDYA |
| | | DSVKGRFTISADNSKNTAYLQMNSLKPEDTAVYYCARGAYGSGTYDYWGQGTLVTVSS |
| 7-17 | 2295 | EVQLVESGGGLVQPGGSLRLSCAASGFSLDYYGMGWFRQAPGKEREFVAAITSGGTPHY |
| | | ADSVKGRFTISADNSKNTAYLQMNSLKPEDTAVYYCASAYNPGIGYDWGQGTLVTVSS |
| 7-18 | 2296 | EVQLVESGGGLVQPGGSLRLSCAASGLTDRRYTMGWFRQAPGKEREFVASITLGGSTAYA |
| | | DSVKGRFTISADNSKNTAYLQMNSLKPEDTAVYYCAKEDVGKPFDWGQGTLVTVSS |
| 7-19 | 2297 | EVQLVESGGGLVQPGGSLRLSCAASGRTFRRYTMGWFRQAPGKEREFVASITSSGVNAYA |
| | | DSVKGRFTISADNSKNTAYLQMNSLKPEDTAVYYCAKEDVGKPFDWGQGTLVTVSS |
| 7-20 | 2298 | EVQLVESGGGLVQPGGSLRLSCAASGPTFSIYAMGWFRQAPGKEREFVAGISWNGGSTNY |
| | | ADSVKGRFTISADNSKNTAYLQMNSLKPEDTAVYYCALRRRFGGQEWGQGTLVTVSS |
| 7-21 | 2299 | EVQLVESGGGLVQPGGSLRLSCAASGRTISRYTMGWFRQAPGKEREFVASITSGGSTAYA |
| | | DSVKGRFTISADNSKNTAYLQMNSLKPEDTAVYYCAKEDVGKPFDWGQGTLVTVSS |
| 7-22 | 2300 | EVQLVESGGGLVQPGGSLRLSCAASGRTITRYTMGWFRQAPGKEREFVASITSGGSTAYA |
| | | DSVKGRFTISADNSKNTAYLQMNSLKPEDTAVYYCAKQDVGKPFDWGQGTLVTVSS |
| 7-23 | 2301 | EVQLVESGGGLVQPGGSLRLSCAASGFTFENHAMGWFRQAPGKEREFVAEIYPSGSTIYA |
| | | DSVKGRFTISADNSKNTAYLQMNSLKPEDTAVYYCAARILSRNWGQGTLVTVSS |
| 7-24 | 2302 | EVQLVESGGGLVQPGGSLRLSCAASGSTFSINAMGWFRQAPGKEREFVAGITSSGGYTNY |
| | | ADSVKGRFTISADNSKNTAYLQMNSLKPEDTAVYYCAREVGLYYYGSGSSSRRLLGRIDY |
| | | YFDYWGQGTLVTVSS |
| 7-25 | 2303 | EVQLVESGGGLVQPGGSLRLSCAASGFTFDDYSMGWFRQAPGKEREFVASIEWDGSTYY |
| | | ADSVKGRFTISADNSKNTAYLQMNSLKPEDTAVYYCAAFDGYTGSDWGQGTLVTVSS |
| 7-26 | 2304 | EVQLVESGGGLVQPGGSLRLSCAASGSTFSINAMGWFRQAPGKEREFVAGITSSGGYTNY |
| | | ADSVKGRFTISADNSKNTAYLQMNSLKPEDTAVYYCAADGVPEYSDYASGPVWGQGTLV |
| | | TVSS |
| 7-27 | 2305 | EVQLVESGGGLVQPGGSLRLSCAASGQTFNMGWFRQAPGKEREFVAEINWSGSSTYYAD |
| | | SVKGRFTISADNSKNTAYLQMNSLKPEDTAVYYCAVDGPFGWGQGTLVTVSS |
| 7-28 | 2306 | EVQLVESGGGLVQPGGSLRLSCAASGNTFSDNPMGWFRQAPGKEREFVAILAWDSGSTY |
| | | YADSVKGRFTISADNSKNTAYLQMNSLKPEDTAVYYCTTDYSKLAITKLSYWGQGTLVT |
| 7-29 | 2307 | EVQLVESGGGLVQPGGSLRLSCAASGRTHSIYPMGWFRQAPGKEREFVASITSYGDTNYA |
| | | DSVKGRFTISADNSKNTAYLQMNSLKPEDTAVYYCAARRWIPPGPIWGQGTLVTVSS |
| 7-30 | 2308 | EVQLVESGGGLVQPGGSLRLSCAASGRTFSMHAMGWFRQAPGKEREFVASISSQGRTNY |
| | | ADSVKGRFTISADNSKNTAYLQMNSLKPEDTAVYYCAAEVRNGSDYLPIDWGQGTLVTV |
| | | SS |
| 7-31 | 2309 | EVQLVESGGGLVQPGGSLRLSCAASGFTFSNYSMGWFRQAPGKEREFVAAIHWNGDSTA |
| | | YADSVKGRFTISADNSKNTAYLQMNSLKPEDTA VYYCAAQTEDSAQYIWGQGTLVTVSS |
| 7-32 | 2310 | EVQLVESGGGLVQPGGSLRLSCAASGSTFSVNAMGWFRQAPGKEREFVAGVTRGGYTNY |
| | | ADSVKGRFTISADNSKNTAYLQMNSLKPEDTAVYYCAADGVPEYSDYASGPVWGQGTLV |
| | | TVSS |
| 7-33 | 2311 | EVQLVESGGGLVQPGGSLRLSCAASGSIGSINAMGWFRQAPGKEREFVAGISNGGTTNYA |
| | | DSVKGRFTISADNSKNTAYLQMNSLKPEDTAVYYCAADGVPEYSDYASGPVWGQGTLVT |
| | | VSS |
| 7-34 | 2312 | EVQLVESGGGLVQPGGSLRLSCAASGRTFGSYDMGWFRQAPGKEREFVAFIHRSGGSTYY |
| | | ADSVKGRFTISADNSKNTAYLQMNSLKPEDTAVYYCATFPAIVTDSDYDLGNDWGQGTL |
| | | VTVSS |
| 7-35 | 2313 | EVQLVESGGGLVQPGGSLRLSCAASGGTFGHYAMGWFRQAPGKEREFVAAVSWSGSSTY |
| | | YADSVKGRFTISADNSKNTAYLQMNSLKPEDTAVYYCAVSQPLNYYTYYDARRYDWGQ |
| | | GTLVTVSS |
| 7-36 | 2314 | EVQLVESGGGLVQPGGSLRLSCAASGFGFGSYDMGWFRQAPGKEREFVTAINWSGARAY |
| | | YADSVKGRFTISADNSKNTAYLQMNSLKPEDTAVYYCAARSVYSYDYNWGQGTLVTVSS |
| 7-37 | 2315 | EVQLVESGGGLVQPGGSLRLSCAASGSTLSINAMGWFRQAPGKEREFVAGITRSGSVTNY |
| | | ADSVKGRFTISADNSKNTAYLQMNSLKPEDTAVYYCAADGVPEYSDYASGPVWGQGTLV |
| | | TVSS |
| 7-38 | 2316 | EVQLVESGGGLVQPGGSLRLSCAASGRPFSEYTMGWFRQAPGKEREFVSSIHWGGRGTNY |
| | | ADSVKGRFTISADNSKNTAYLQMNSLKPEDTAVYYCAAELHSSDYTSPGAYAWGQGTLV |
| | | TVSS |
| 7-39 | 2317 | EVQLVESGGGLVQPGGSLRLSCAASGRTFSNYPMGWFRQAPGKEREFVAAITWSGDSTN |
| | | YADSVKGRFTISADNSKNTAYLQMNSLKPEDTAVYYCALPSNIITTDYLRVYWGQGTLVT |
| | | VSS |
| 7-40 | 2318 | EVQLVESGGGLVQPGGSLRLSCAASGRTFRRYTMGWFRQAPGKEREFVASITKFGSTNYA |
| | | DSVKGRFTISADNSKNTAYLQMNSLKPEDTAVYYCAKEDVGKPFDWGQGTLVTVSS |
| 7-41 | 2319 | EVQLVESGGGLVQPGGSLRLSCAASGRTFSTYVMGWFRQAPGKEREFVASISSRGITHYA |
| | | DSVKGRFTISADNSKNTAYLQMNSLKPEDTAVYYCAKEDVGKPFDWGQGTLVTVSS |
| 7-42 | 2320 | EVQLVESGGGLVQPGGSLRLSCAASGFTLDYYGMGWFRQAPGKEREFVAAITSGGTPHY |
| | | GDSVKGRFTISADNSKNTAYLQMNSLKPEDTAVYYCASAYNPGIGYDWGQGTLVTVSS |
| 7-43 | 2321 | EVQLVESGGGLVQPGGSLRLSCAASGFTFGHYAMGWFRQAPGKEREFVAAVSWSGSTTY |
| | | YADSVKGRFTISADNSKNTAYLQMNSLKPEDTAVYYCAVSHPLNYYTYYDARRYDWGQ |
| | | GTLVTVSS |
| 7-44 | 2322 | EVQLVESGGGLVQPGGSLRLSCAASGFTFEDYAMGWFRQAPGKEREGVAAITRGSNTTD |
| | | YADSVKGRFTISADNSKNTAYLQMNSLKPKDTAVYYCAARRWMGGSYFDPGNYDWGQ |
| | | GTLVTVSS |
| 7-45 | 2323 | EVQLVESGGGLVQPGGSLRLSCAASGRTLSRYTMGWFRQAPGKEREFVASITSGGSTNYA |
| | | DSVKGRFTISADNSKNTAYLQMNSLKPEDTAVYYCAKEDVGKPFDWGQGTLVTVSS |
| 8-1 | 2324 | EVQLVESGGGLVQPGGSLRLSCAASGRTFASYAMGWFRQAPGKEREFVGAISRSGDSTYY |
| | | ADSVKGRFTISADNSKNTAYLQMNSLKPEDTAVYYCARAPFYCTTTKCQDNYYYMDVW |
| | | GQGTLVTVSS |
| 8-2 | 2325 | EVQLVESGGGLVQPGGSLRLSCAASGGTYHAMGWFRQAPGKEREFVAGITSDDRTNYAD |
| | | SVKGRFTISADNSKNTAYLQMNSLKPEDTAVYYCARERRYYDSSGYPYYFDYWGQGTLV |
| | | TVSS |
| 8-3 | 2326 | EVQLVESGGGLVQPGGSLRLSCAASGTTLDYYAMGWFRQAPGKEREFVAAISWSGGSTA |
| | | YADSVKGRFTISADNSKNTAYLQMNSLKPEDTAVYYCAREDYYDSSGYSWGQGTLVTVS |
| | | S |
| 8-4 | 2327 | EVQLVESGGGLVQPGGSLRLSCAASGGTLSRSRMGWFRQAPGKEREFVAFIGSDTLYADS |
| | | VKGRFTISADNSKNTAYLQMNSLKPEDTAVYYCANLAYYDSSGYYDYWGQGTLVTVSS |
| 8-5 | 2328 | EVQLVESGGGLVQPGGSLRLSCAASGGTFSFYNMGWFRQAPGKEREFVAFISGNGGTSYA |
| | | DSVKGRFTISADNSKNTAYLQMNSLKPEDTAVYYCAVVAMRMVTTEGPDVLDVWGQGT |
| | | LVTVSS |
| 8-6 | 2329 | EVQLVESGGGLVQPGGSLRLSCAASGFTFDYYAMGWFRQAPGKEREFVSAIDSEGRTSYA |
| | | DSVKGRFTISADNSKNTAYLQMNSLKPEDTAVYYCARWGPFDIWGQGTLVTVSS |
| 8-7 | 2330 | EVQLVESGGGLVQPGGSLRLSCAASGFPFSIWPMGWFRQAPGKEREFVAAVRWSSTGIYY |
| | | TQYADSVKGRFTISADNSKNTAYLQMNSLKPEDTAVYYCTRSEYSSGWYDYWGQGTLVT |
| | | VSS |
| 8-8 | 2331 | EVQLVESGGGLVQPGGSLRLSCAASGFAESSSMGWFRQAPGKEREFVAAISWSGDITIYAD |
| | | SVKGRFTISADNSKNTAYLQMNSLKPEDTAVYYCARGAPYFDHGSKSYRLFYFDYWGQG |
| | | TLVTVSS |
| 8-9 | 2332 | EVQLVESGGGLVQPGGSLRLSCAASGFTFGTTTMGWFRQAPGKEREFVAAISWSTGIAHY |
| | | ADSVKGRFTISADNSKNTAYLQMNSLKPEDTAVYYCARGGPNYYASGRYPWFDPWGQG |
| | | TLVTVSS |
| 8-10 | 2333 | EVQLVESGGGLVQPGGSLRLSCAASGFIGNYHAMGWFRQAPGKEREFVAAVTWSGGTTN |
| | | YADSVKGRFTISADNSKNTAYLQMNSLKPEDTAVYYCAREGYYYDSSGYPYYFDYWGQ |
| | | GTLVTVSS |
| 2A-1 | 2334 | EVQLLESGGGLVQPGGSLRLSCAASGFTFSNYATDWVRQAPGKGLEWVSIISGSGGATYY |
| | | ADSVKGRFTISRDNSKNTLYLQMNSLRAEDTAVYYCAKGGYCSSDTCWWEYWLDPWGQ |
| | | GTLVTVSS |
| 2A-10 | 2335 | EVQLLESGGGLVQPGGSLRLSCAASGFTFSAFAMGWVRQAPGKGLEWVSAITASGDITYY |
| | | ADSVKGRFTISRDNSKNTLYLQMNSLRAEDTAVYYCARQSDGLPSPWHFDLGGQGTLVT |
| | | VSS |
| 2A-5 | 2336 | EVQLLESGGGLVQPGGSLRLSCAASGFTFSDFAMAWVRQAPGKGLEWVSAISGSGDITYY |
| | | ADSVKGRFTISRDNSKNTLYLQMNSLRAEDTAVYYCAREADGLHSPWHFDLWGQGTLVT |
| | | VSS |
| 2A-2 | 2337 | EVQLLESGGGLVQPGGSLRLSCAASGFTFSRHAMNWVRQAPGKGLEWVSGISGSGDETY |
| | | YADSVKGRFTISRDNSKNTLYLQMNSLRAEDTAVYYCARDLPASYYDSSGYYWHNGMD |
| | | VWGQGTLVTVSS |
| 2A-4 | 2338 | EVQLLESGGGLVQPGGSLRLSCAASGFTFSDFAMAWVRQAPGKGLEWVSAISGSGDITYY |
| | | ADSVKGRFTISRDNSKNTLYLQMNSLRAEDTAVYYCAREADGLHSPWHFDLWGQGTLVT |
| | | VSS |
| 2A-6 | 2339 | EVQLLESGGGLVQPGGSLRLSCAASGFTFSNYPMNWVRQAPGKGLEWVSTISGSGGNTFY |
| | | ADSVKGRFTISRDNSKNTLYLQMNSLRAEDTAVYYCVRHDEYSFDYWGQGTLVTVSS |
| 2A-11 | 2340 | EVQLLESGGGLVQPGGSLRLSCAASGFTFSDFAMAWVRQAPGKGLEWVSAITGSGDITYY |
| | | ADSVKGRFTISRDNSKNTLYLQMNSLRAEDTAVYYCAREADGLHSPWHFDLWGQGTLVT |
| | | VSS |
| 2A-12 | 2341 | EVQLLESGGGLVQPGGSLRLSCAASGFTFSDYPMNWVRQAPGKGLEWVSTISGSGGITFY |
| | | ADSVKGRFTISRDNSKNTLYLQMNSLRAEDTAVYYCVRHDEYSFDYWGQGTLVTVSS |
| 2A-13 | 2342 | EVQLLESGGGLVQPGGSLRLSCAASGFTFSDYPMNWVRQAPGKGLEWVSAISGSGDNTY |
| | | YADSVKGRFTISRDNSKNTLYLQMNSLRAEDTAVYYCVRHDEYSFDYWGQGTLVTVSS |
| 2A-14 | 2343 | EVQLLESGGGLVQPGGSLRLSCAASGFTFSDFAMAWVRQAPGKGLEWVSAITGTGDITYY |
| | | ADSVKGRFTISRDNSKNTLYLQMNSLRAEDTAVYYCAREADGLHSPWGQGTLVTVSS |
| 2A-7 | 2344 | EVQLLESGGGLVQPGGSLRLSCAASGFTFSDYPMNWVRQAPGKGLEWVSAITGSGDITYY |
| | | ADSVKGRFTISRDNSKNTLYLQMNSLRAEDTAVYYCVRHDEYSFDYWGQGTLVTVSS |
| 2A-8 | 2345 | EVQLLESGGGLVQPGGSLRLSCAASGFTFSDFAMAWVRQAPGKGLEWVSAISGSGDITYY |
| | | ADSVKGRFTISRDNSKNTLYLQMNSLRAEDTAVYYCAREADGLHSPWHFDLWGQGTLVT |
| | | VSS |
| 2A-15 | 2346 | EVQLLESGGGLVQPGGSLRLSCAASGFTFSDFAMAWVRQAPGKGLEWVSAISGSGDITYY |
| | | ADSVKGRFTISRDNSKNTLYLQMNSLRAEDTAVYYCAREADGLHSPWHFDLWGQGTLVT |
| | | VSS |
| 2A-9 | 2347 | EVQLLESGGGLVQPGGSLRLSCAASGFTFPRYAMSWVRQAPGKGLEWVSTISGSGSTTYY |
| | | ADSVKGRFTISRDNSKNTLYLQMNSLRAEDTAVYYCARLIDAFDIWGQGTLVTVSS |
| 2A-16 | 2348 | EVQLLESGGGLVQPGGSLRLSCAASGFTFSSYAMSWVRQAPGKGLEWVSVISGSGGSTYY |
| | | ADSVKGRFTISRDNSKNTLYLQMNSLRAEDTAVYYCAREGYRDYLWYFDLWGQGTLVT |
| | | VSS |
| 2A-17 | 2349 | EVQLLESGGGLVQPGGSLRLSCAASGFTFSNYAMSWVRQAPGKGLEWVSAISGSAGSTYY |
| | | ADSVKGRFTISRDNSKNTLYLQMNSLRAEDTAVYYCARVRQGLRRTWYYFDYWGQGTL |
| | | VTVSS |
| 2A-18 | 2350 | EVQLLESGGGLVQPGGSLRLSCAASGFTFSSYAMYWVRQAPGKGLEWVSAISGSAGSTYY |
| | | ADSVKGRFTISRDNSKNTLYLQMNSLRAEDTAVYYCARDTNDFWSGYSIFDPWGQGTLV |
| | | TVSS |
| 2A-19 | 2351 | EVQLLESGGGLVQPGGSLRLSCAASGFTFSSYTMSWVRQAPGKGLEWVSVISGSGGSTYY |
| | | ADSVKGRFTISRDNSKNTLYLQMNSLRAEDTAVYYCAREGYRDYLWYFDLWGQGTLVT |
| | | VSS |
| 2A-2 | 2352 | EVQLLESGGGLVQPGGSLRLSCAASGFTFSSYDMSWVRQAPGKGLEWVSVISGSGGSTYY |
| | | ADSVKGRFTISRDNSKNTLYLQMNSLRAEDTAVYYCAKGPLVGWYFDLWGQGTLVTVSS |
| 2A-21 | 2353 | EVQLLESGGGLVQPGGSLRLSCAASGFTFPRYAMSWVRQAPGKGLEWVSTISGSGSTTYY |
| | | ADSVKGRFTISRDNSKNTLYLQMNSLRAEDTAVYYCARLIDAFDIWGQGTLVTVSS |
| 2A-22 | 2354 | EVQLLESGGGLVQPGGSLRLSCAASGFTFTTYALSWVRQAPGKGLEWVSGISGSGDETYY |
| | | ADSVKGRFTISRDNSKNTLYLQMNSLRAEDTAVYYCTTGDDFWSGGNWFDPWGQGTLV |
| | | TVSS |
| 2A-23 | 2355 | EVQLLESGGGLVQPGGSLRLSCAASGFTFSRHAMNWVRQAPGKGLEWVSGITGSGDETY |
| | | YADSVKGRFTISRDNSKNTLYLQMNSLKAEDTAVYYCARDLPASYYDSSGYYWHNGMD |
| | | VWGQGTLVTVSS |
| 2A-24 | 2356 | EVQLLESGGGLVQPGGSLRLSCAASGFVFSSYAMSWVRQAPGKGLEWVSAISGSGGSSYY |
| | | ADSVKGRFTISRDNSKNTLYLQMNSLRAEDTAVYYCARVGGGYWYGIDVWGQGTLVTV |
| | | SS |
| 2A-25 | 2357 | EVQLLESGGGLVQPGGSLRLSCAASGFTLSSYVMSWVRQAPGKGLEWVSGISGGGASTY |
| | | YADSVKGRFTISRDNSKNTLYLQMNSLRAEDTAVYYCARGYSRNWYPSWFDPWGQGTL |
| | | VTVSS |
| 2A-26 | 2358 | EVQLLESGGGLVQPGGSLRLSCAASGFTFSTYAMSWVRQAPGKGLEWVSSIGGSGSTTYY |
| | | ADSVKGRFTISRDNSKNTLYLQMNSLRAEDTAVYYCAGGWYLDYWGQGTLVTVSS |
| 2A-27 | 2359 | EVQLLGSGGGLVQPGGSLRLSCAASGFTYSNYAMTWVRQAPGKGLEWVSAISGSSGSTY |
| | | YADSVKGRFTISRDNSKNTLYLQMNSLRAEDTAVYYCASLCIVDPFDIWGQGTLVTVSS |
| 2A-28 | 2360 | EVQLLESGGGLVQPGGSLRLSCAASGFTFSNYPMNWVRQAPGKGLEWVSTISGSGGNTFY |
| | | ADSVKGRFTISRDNSKNTLYLQMNSLRAEDTAVYYCVRHDEYSFDYWGQGTLVTVSS |
| 3A-10 | 2361 | EVQLLESGGGLVQPGGSLRLSCAASGFTFRSHAMSWVRQAPGKGLEWVSSISGGGASTYY |
| | | ADSVKGRFTISRDNSKNTLYLQMNSLRAEDTAVYYCARVKYLTTSSGWPRPYFDNWGQG |
| | | TLVTVSS |
| 3A-4 | 2362 | EVQLLESGGGLVQPGGSLRLSCAASGFTFSAYSMSWVRQAPGKGLEWVSAISGSGGSRYY |
| | | ADSVKGRFTISRDNSKNTLYLQMNSLRAEDTAVYYCGRSKWPQANGAFDIWGQGTLVTV |
| | | SS |
| 3A-7 | 2363 | EVQLLESGGGLVQPGGSLRLSCAASGFMFGNYAMSWVRQAPGKGLEWVAAISGSGGSTY |
| | | YADSVKGRFTISRDNSKNTLYLQMNSLRAEDTAVYYCAKDRGYSSSWYGGFDYWGQGT |
| | | LVTVSS |
| 3A-1 | 2364 | EVQLLESGGGLVQPGGSLRLSCAASGFTFRNHAMAWVRQAPGKGLEWVSGISGSGGTTY |
| | | YGDSVKGRFTISRDNSKNTLYLQMNSLRAEDTAVYYCARGTRFLQWSLPLDVWGQGTLV |
| | | TVSS |
| 3A-5 | 2365 | EVQLLESGGGLVQPGGSLRLSCAASGFTIPNYAMSWVRQAPGKGLEWVSGISGAGASTYY |
| | | ADSVKGRFTISRDNSKNTLYLQMNSLRAEDTAVYYCARHTWWKGAGFFDHWGQGTLVT |
| | | VSS |
| 3A-6 | 2366 | EVQLLESGGGLVQPGGSLRLSCAASGFTFRNYAMAWVRQAPGKGLEWVSGISGSGGTTY |
| | | YGDSVKGRFTISRDNSKNTLYLQMNSLRAEDTAVYYCARGTRFLEWSLPLDVWGQGTLV |
| | | TVSS |
| 3A-15 | 2367 | EVQLLESGGGLVQPGGSLRLSCAASGFTIRNYAMSWVRQAPGKGLEWVSSISGGGASTYY |
| | | ADSVKGRFTISRDNSKNTLYLQMNSLRAEDTAVYYCARVKYLTTSSGWPRPYFDNWGQG |
| | | TLVTVSS |
| 3A-3 | 2368 | EVQLLESGGGLVQPGGSLRLSCAASGFTIPNYAMSWVRQAPGKGLEWVSGISGSGASTYY |
| | | ADSVKGRFTISRDNSKNTLYLQMNSLRAEDTAVYYCARHTWWKGAGFFDHWGQGTLVT |
| | | VSS |
| 3A-11 | 2369 | EVQLLESGGGLVQPGGSLRLSCAASGFTITNYAMSWVRQAPGKGLEWVSGISGSGAGTYY |
| | | ADSVKGRFTISRDNSKNTLYLQMNSLRAEDTAVYYCARHAWWKGAGFFDHWGQGTLVT |
| | | VSS |
| 3A-8 | 2370 | EVQLLESGGGLVQPGGSLRLSCAASGFTFRSHAMSWVRQAPGKGLEWVSSISGGGASTYY |
| | | ADSVKGRFTISRDNSKNTLYLQMNSLRAEDTAVYYCARVKYLTTSSGWPRPYFDNWGQG |
| | | TLVTVSS |
| 3A-2 | 2371 | EVQLLESGGGLVQPGGSLRLSCAASGFTITNYAMSWVRQAPGKGLEWVSGISGSGASTYY |
| | | ADSVKGRFTISRDNSKNTLYLQMNSLRAEDTAVYYCARHTWWKGAGFFDHWGQGTLVT |
| | | VSS |
| 3A-12 | 2372 | EVQLLESGGGLVQPGGSLRLSCAASGFTFRSHAMNWVRQAPGKGLEWVSAISGSGGSTN |
| | | YADSVKGRFTISRDNSKNTLYLQMNSLRAEDTAVYYCARGLKFLEWLPSAFDIWGQGTL |
| | | VTVSS |
| 3A-14 | 2373 | EVQLLESGGGLVQPGGSLRLSCAASGFTFRSHAMSWVRQAPGKGLEWVSSISGGGASTYY |
| | | ADSVKGRFTISRDNSKNTLYLQMNSLRAEDTAVYYCARVKYLTTSSGWPRPYFDNWGQG |
| | | TLVTVSS |
| 3A-9 | 2374 | EVQLLESGGGLVQPGGSLRLSCAASGFTFRSYAMSWVRQAPGKGLEWVSSISGGGASTYY |
| | | ADSVKGRFTISRDNSKNTLYLQMNSLRAEDTAVYYCARVKYLTTSSGWPRPYFDNWGQG |
| | | TLVTVSS |
| 3A-13 | 2375 | EVQLLESGGGLVQPGGSLRLSCAASGFTITNYAMSWVRQAPGKGLEWVSGISGSGAGTYY |
| | | ADSVKGRFTISRDNSKNTLYLQMNSLRAEDTAVYYCARHTWWKGAGFFDHWGQGTLVT |
| | | VSS |
| 3A-16 | 2376 | EVQLLESGGGLVQPGGSLRLSCAASGFTFTNFAMSWVRQAPGKGLEWVSAISGRGGGTY |
| | | YADSVKGRFTISRDNSKNTLYLQMNSLRAEDTAVYYCARDAHGYYYDSSGYDDWGQGT |
| | | LVTVSS |
| 3A-17 | 2377 | EVQLLESGGGLVQPGGSLRLSCAASGFTFRSYPMSWVRQAPGKGLEWVSTISGSGGITYY |
| | | ADSVKGRFTISRDNSKNTLYLQMNSLRAEDTAVYYCAKGVYGSTVTTCHWGQGTLVTVS |
| | | S |
| 3A-18 | 2378 | EVQLLESGGGLVQPGGSLRLSCAASGFTLTSYAMSWVRQAPGKGLEWVSAISGSGVDTY |
| | | YADSVKGRFTISRDNSKNTLYLQMNSLRAEDTAVYYCARPTNWGFDYWGQGTLVTVSS |
| 3A-19 | 2379 | EVQLLESGGGLVQPGGSLRLSCAASGFTFINYAMSWVRQAPGKGLEWVSTISTSGGNTYY |
| | | ADSVKGRFTISRDNSKNTLYLQMNSLRAEDTAVYYCARADSNWASSAYWGQGTLVTVSS |
| 3A-2 | 2380 | EVQLLESGGGLVQPGGSLRLSCAASGFPFSTYAMSWVRQAPGKGLEWVSGISVSGGFTYY |
| | | ADSVKGRFTISRDNSKNTLYLQMNSLRAEDTAVYYCARDPYSYGYYYYYGMDVWGQGT |
| | | LVTVSS |
| 3A-21 | 2381 | EVQLLESGGGLVQPGGSLRLSCAASGFTFSTYAMGWVRQAPGKGLEWVSGISGGGVSTY |
| | | YADSVKGRFTISRDNSKNTLYLQMNSLRAEDTAVYYCARARNWGPSDYWGQGTLVTVS |
| | | S |
| 3A-22 | 2382 | EVQLLESGGGLVQPGGSLRLSCAASGFIFSDYAMTWVRQAPGKGLEWVSAISGSAFYADS |
| | | VKGRFTISRDNSKNTLYLQMNSLRAEDTAVYYCARDATYSSSWYNWFDPWGQGTLVTV |
| | | SS |
| 3A-23 | 2383 | EVQLLESGGGLVQPGGSLRLSCAASGFTFSDYAMTWVRQAPGKGLEWVSDISGSGGSTY |
| | | YADSVKGRFTISRDNSKNTLYLQMNSLRAEDTAVYYCARGTVTSFDFWGQGTLVTVSS |
| 3A-24 | 2384 | EVQLLESGGGLVQPGGSLRLSCAASGFTFSIYAMGWVRQAPGKGLEWVSFISGSGGSTYY |
| | | ADSVKGRFTISRDNSKNTLYLQMNSLRAEDTAVYYCAKDYHSASWFSAAADYWGQGTL |
| | | VTVSS |
| 3A-25 | 2385 | EVQLLESGGGLVQPGGSLRLSCAASGFTFASYAMTWVRQAPGKGLEWVSAISESGGSTYY |
| | | ADSVKGRFTISRDNSKNTLYLQMNSLRAEDTAVYYCAREGQEYSSGSSYFDYWGQGTLV |
| | | TVSS |
| 3A-26 | 2386 | EVQLLESGGGLVQPGGSLRLSCAASGFTFSEYAMSWVRQAPGKGLEWVSAITGSGGSTYY |
| | | GDSVKGRFTISRDNSKNTLYLQMNSLRAEDTAVYYCARGSQTPYCGGDCPETFDYWGQG |
| | | TLVTVSS |
| 3A-27 | 2387 | EVQLLESGGGLVQPGGSLRLSCAASGFTFDDYAMSWVRQAPGKGLEWVSGISGGGTSTY |
| | | YADSVKGRFTISRDNSKNTLYLQMNSLRAEDTAVYYCARDLYSSGWYGFDYWGQGTLV |
| | | TVSS |
| 3A-28 | 2388 | EVQLLESGGGLVQPGGSLRLSCAASGFTFNNYAMNWVRQAPGKGLEWVSAISGSVGSTY |
| | | YADSVKGRFTISRDNSKNTLYLQMNSLRAEDTAVYYCARDNYDFWSGYYTNWFDPWGQ |
| | | GTLVTVSS |
| 3A-29 | 2389 | EVQLLESGGGLVQPGGSLRLSCAASGFTFTNHAMSWVRQAPGKGLEWVSAISGSGSNIYY |
| | | ADSVKGRFTISRDNSKNTLYLQMNSLRAEDTAVYYCARDSLSVTMGRGVVTYYYYGMD |
| | | FWGQGTLVTVSS |
| 4A-51 | 2390 | EVQLVESGGGLVQPGGSLRLSCAASGPGTAIMGWFRQAPGKEREFVARISTSGGSTKYAD |
| | | SVKGRFTISADNSKNTAYLQMNSLKPEDTAVYYCARTTVTTPPLIWGQGTLVTVSS |
| 4A-52 | 2391 | EVQLVESGGGLVQPGGSLRLSCAASGRSFSNSVMGWFRQAPGKEREFVARITWNGGSTY |
| | | YADSVKGRFTISADNSKNTAYLQMNSLKPEDTAVYYCATTENPNPRWGQGTLVTVSS |
| 4A-53 | 2392 | EVQLVESGGGLVQPGGSLRLSCAASGRTFGDDTMGWFRQAPGKEREFVAAVSWSGSGVY |
| | | YADSVKGRFTITADNSKNTAYLQMNSLKPENTAVYYCATDPPLFWGQGTLVTVSS |
| 4A-54 | 2393 | EVQLVESGGGLVQPGGSLRLSCAASGRTFSDARMGWFRQAPGKEREFVGAVSWSGGTTV |
| | | YADSVKGRFTISADNSKNTAYLQMNSLKPEDTAVYYCATTEDPYPRWGQGTLVTVSS |
| 4A-49 | 2394 | EVQLVESGGGLVQPGGSLRLSCAASGRTFGDYIMGWFRQAPGKERESVAAINWSAGYTA |
| | | YADSVKGRFTISADNSKNTAYLQMNSLKPEDTAVYYCARASPNTGWHFDHWGQGTLVT |
| | | VSS |
| 4A-55 | 2395 | EVQLVESGGGLVQPGGSLRLSCAASGSGLSINAMGWFRQAPGKERESVAAISWSGGSTYT |
| | | AYADSVKGRFTISADNSKNTAYLQMNSLKPEDTAVYYCAAYQAGWGDWGQGTLVTVSS |
| 4A-39 | 2396 | EVQLVESGGGLVQPGGSLRLSCAASGRTFSNAAMGWFRQAPGKEREFVARILWTGASRN |
| | | YADSVKGRFTISADNSKNTAYLQMNSLKPEDTAVYYCATTENPNPRWGQGTLVTVSS |
| 4A-56 | 2397 | EVQLVESGGGLVQPGGSLRLSCAASGFSLDYYGMGWFRQAPGKERESVAAISWNGDFTA |
| | | YADSVKGRFTISADNSKNTAYLQMNSLKPEDTAVYYCAKRANPTGAYFDYWGQGTLVT |
| | | VSS |
| 4A-33 | 2398 | EVQLVESGGGLVQPGGSLRLSCAASGFTFSRHDMGWFRQAPGKEREFVAGINWESGSTN |
| | | YADSVKGRFTISADNSKNTAYLQMNSLKPEDTAVYYCAADRGVYGGRWYRTSQYTWGQ |
| | | GTLVTVSS |
| 4A-57 | 2399 | EVQLVESGGGLVQPGGSLRLSCAASGLTFRNYAMGWFRQAPGKEREFVAAIGSGGYTDY |
| | | ADSVKGRFTISADNSKNTAYLQMNSLKPEDTAVYYCAVKPGWVARDPSQYNWGQGTLV |
| | | TVSS |
| 4A-25 | 2400 | EVQLVESGGGLVQPGGSLRLSCAASGGTFSRYAMGWFRQAPGKEREWVSAVDSGGSTYY |
| | | ADSVKGRFTISADNSKNTAYLQMNSLKPEDTAVYYCAASPSLRSAWQWGQGTLVTVSS |
| 4A-58 | 2401 | EVQLVESGGGLVQPGGSLRLSCAASGFTLDYYDMGWFRQAPGKEREFVAAVTWSGGSTY |
| | | YADSVKGRFTISADNSKNTAYLQMNSLKPEDTAVYYCAADRRGLASTRAADYDWGQGT |
| | | LVTVSS |
| 4A-59 | 2402 | EVQLVESGGGLVQPGGSLRLSCAASGRTFGDYIMGWFRQAPGKEREFVAAINWSAGYTP |
| | | YADSVKGRFTISADNSKNTAYLQMNSLKPEDTAVYYCATAPPLFCWHFDLWGQGTLVTV |
| | | SS |
| 4A-6 | 2403 | EVQLVESGGGLVQPGGSLRLSCAASGRTFGDDIMGWFRQAPGKEREFVAAIHWSAGYTR |
| | | YADSVKGRFTISADNSKNTAYLQMNSLKPEDTAVYYCATDPPLFWGHVDLWGQGTLVT |
| | | VSS |
| 4A-61 | 2404 | EVQLVESGGGLVQPGGSLRLSCAASGRTFGDYIMGWFRQAPGKEREIVAAINWSADYTPY |
| | | ADSVKGRFTISADNSKNTAYLQMNSLKPEDTAVYYCATAPPNTGWHFDHWGQGTLVTVS |
| | | S |
| 4A-3 | 2405 | EVQLVESGGGLVQPGGSLRLSCAASGRTFGDYIMGWFRQAPGKEREIVAAINWSAGYTA |
| | | YADSVKGRFTISADNSKNTAYLQMNSLKPEDTAVYYCATATPNTGWHFDHWGQGTLVT |
| | | VSS |
| 4A-62 | 2406 | EVQLVESGGGLVQPGGSLRLSCAASGRTFSDDTMGWFRQAPGKEREFVAAINWSGGSTD |
| | | YADSVKGRFTISADNSKNTAYLQMNSLKPEDTAVYYCATDPPLFWGQGTLVTVSS |
| 4A-43 | 2407 | EVQLVESGGGLVQPGGSLRLSCAASGRTFGDDTMGWFRQAPGKEREFVAGINWSGGNTY |
| | | YADSVKGRFTISADNSKNTAYLQMNSLKPEDTAVYYCATDPPLFWGQGTLVTVSS |
| 4A-5 | 2408 | EVQLVESGGGLVQPGGSLRLSCAASGRTFGDYIMGWFRQAPGKEREFVAAINWTGGYTS |
| | | YADSVKGRFTISADNSKNTAYLQMNSLKPEDTAVYYCATDPPLFWGQGTLVTVSS |
| 4A-42 | 2409 | EVQLVESGGGLVQPGGSLRLSCAASGRTFGDDTMGWFRQAPGKERECVAAINWSGGNTY |
| | | YADSVKGRFTISADNSKNTAYLQMNSLKPEDTAVYYCATDPPLFWGQGTLVTVSS |
| 4A-63 | 2410 | EVQLVESGGGLVQPGGSLRLSCAASGRTFSDYTMGWFRQAPGKEREFVAAINWSGGYTY |
| | | YADSVKGRFTISADNSKNTAYLQMNSLKPEDTAVYYCATDPPLFWGQGTLVTVSS |
| 4A-6 | 2411 | EVQLVESGGGLVQPGGSLRLSCAASGRTFGDYGMGWFRQAPGKEREFVATINWSGALTH |
| | | YADSVKGRFTISADNSKNTAYLQMNSLKPEDTAVYYCATLPFYDFWSGYYTGYYYMDV |
| | | WGQGTLVTVSS |
| 4A-40 | 2412 | EVQLVESGGGLVQPGGSLRLSCAASGRTFSDDTMGWFRQAPGKEREFLAGVTWSGSSTF |
| | | YADSVKGRFTISADNSKNTAYLQMNSLKPEDTAVYYCATDPPLFWGQGTLVTVSS |
| 4A-21 | 2413 | EVQLVESGGGLVQPGGSLRLSCAASGRTFSDDIMGWFRQAPGKEREFVAAISWSGGNTHY |
| | | ADSVKGRFTISADNSKNTAYLQMNSLKPEDTAVYYCATDPPLFWGQGTLVTVSS |
| 4A-64 | 2414 | EVQLVESGGGLVQPGGSLRLSCAASGRTFGDYIMGWFRQAPGKERESVAAINWSAGYTA |
| | | YADSVKGRFTISADNSKNTAYLQMNSLKPEDTAVYYCATASPNTGWHFDHWGQGTLVT |
| | | VSS |
| 4A-47 | 2415 | EVQLVESGGGLVQPGGSLRLSCAASGFTFDDDYVMGWFRQAPGKEREFVAAVSGSGDDT |
| | | YYADSVKGRFTISADNSKNTAYLQMNSLKPEDTAVYYCAADRRGLASTRAADYDWGQG |
| | | TLVTVSS |
| 4A-65 | 2416 | EVQLVESGGGLVQPGGSLRLSCAASGRTFGDYIMGWFRQAPGKEREFVAAINWSAGYTA |
| | | YADSVKGRFTISADNSKNTAYLQMNSLKPEDTAVYYCATEPPLSCWHFDLWGQGTLVTV |
| | | SS |
| 4A-18 | 2417 | EVQLVESGGGLVQPGGSLRLSCAASGRTFGDYIMGWFRQAPGKEREIVAAINWSGGYTPY |
| | | ADSVKGRFTISADNSKNTAYLQMNSLKPEDTAVYYCATAPPNTGWHFDHWGQGTLVTVS |
| | | S |
| 4A-66 | 2418 | EVQLVESGGGLVQPGGSLRLSCAASGRTFGDDTMGWFRQAPGKEREIVAAINWSAGYTP |
| | | YADSVKGRFTISADNSKNTAYLQMNSLKPEDTAVYYCATDPPLFCCHFDLWGQGTLVTV |
| | | SS |
| 4A-36 | 2419 | EVQLVESGGGLVQPGGSLRLSCAASGRTFSDDTMGWFRQAPGKEREFVAAISWSGGTTR |
| | | YADSVKGRFTISADNSKNTAYLQMNSLKPEDTAVYYCATDPPLFWGQGTLVTVSS |
| 4A-67 | 2420 | EVQLVESGGGLVQPGGSLRLSCAASGRTFSDDTMGWFRQAPGKEREFVAAINWSGDSTY |
| | | YADSVKGRFTISADNSKNTAYLQMNSLKPEDTAVYYCATDPPLFWGQGTLVTVSS |
| 4A-16 | 2421 | EVQLVESGGGLVQPGGSLRLSCAASGRTFSDDTMGWFRQAPGKEREFVAAINWSGGTTR |
| | | YADSVKGRFTISADNSKNTAYLQMNSLKPEDTAVYYCATDPPLFWGQGTLVTVSS |
| 4A-11 | 2422 | EVQLVESGGGLVQPGGSLRLSCAASGRTFSDDAMGWFRQAPGKEREFVAAIHWSGSSTR |
| | | YADSVKGRFTISADNSKNTAYLQMNSLKPEDTAVYYCATDPPLFWGQGTLVTVSS |
| 4A-68 | 2423 | EVQLVESGGGLVQPGGSLRLSCAASGRTFSDDTMGWFRQAPGKERELVGTINWSGGSTY |
| | | YADSVKGRFTISADNSKNTAYLQMNSLKPEDTAVYYCATDPPLFWGQGTLVTVSS |
| 4A-34 | 2424 | EVQLVESGGGLVQPGGSLRLSCAASGRTFGDYIMGWFRQAPGKEREFVAAINWSGGYTP |
| | | YADSVKGRFTISADNSKNTAYLQMNSLKPEDTAVYYCATDPPLFWGQGTLVTVSS |
| 4A-28 | 2425 | EVQLVESGGGLVQPGGSLRLSCAASGRTFGDDTMGWFRQAPGKERELVAAINWNGGNT |
| | | HYADSVKGRFTISADNSKNTAYLQMNSLKPEDTAVYYCATDPPLFWGQGTLVTVSS |
| 4A-69 | 2426 | EVQLVESGGGLVQPGGSLRLSCAASGRTFSDDAMGWFRQAPGKEREFVAAINWSGGTTR |
| | | YADSVKGRFTISADNSKNTAYLQMNSLKPEDTAVYYCATDPPLFWGQGTLVTVSS |
| 4A-7 | 2427 | EVQLVESGGGLVQPGGSLRLSCAASGRTFGDYIMGWFRQAPGKERESVAAINWSAGYTP |
| | | YADSVKGRFTISADNSKNTAYLQMNSLKPEDTAVYYCATDPPLFWGHVDLWGQGTLVT |
| | | VSS |
| 4A-71 | 2428 | EVQLVESGGGLVQPGGSLRLSCAASGRTFSDDTMGWFRQAPGKEREWVASINWSGGSTY |
| | | YADSVKGRFTISADNSKNTAYLQMNSLKPEDTAVYYCATDPPLFWGQGTLVTVSS |
| 4A-23 | 2429 | EVQLVESGGGLVQPGGSLRLSCAASGRTFSDDAMGWFRQAPGKEREFVAGISWNGGSIY |
| | | YADSVKGRFTISADNSKNTAYLQMNSLKPEDTAVYYCATDPPLFWGQGTLVTVSS |
| 4A-9 | 2430 | EVQLVESGGGLVQPGGSLRLSCAASGFTFDDYEMGWFRQAPGKEREFVAAISWRGGTTY |
| | | YADSVKGRFTISADNSKNTAYLQMNSLKPEDTAVYYCAADRRGLASTRAGDYDWGQGT |
| | | LVTVSS |
| 4A-72 | 2431 | EVQLVESGGGLVQPGGSLRLSCAASGRTFGDDTMGWFRQAPGKEREFVAAINWSGGYTP |
| | | YADSVKGRFTISADNSKNTAYLQMNSLKPEDTAVYYCATDPPLFWGHVDLWGQGTLVT |
| | | VSS |
| 4A-73 | 2432 | EVQLVESGGGLVQPGGSLRLSCAASGRTFSDDAMGWFRQAPGKEREFVAAINWSGGSTR |
| | | YADSVKGRFTISADNSKNTAYLQMNSLKPEDTAVYYCATDPPLFWGQGTLVTVSS |
| 4A-29 | 2433 | EVQLVESGGGLVQPGGSLRLSCAASGVTLDDYAMGWFRQAPGKEREFVAVINWSGGSTD |
| | | YADSVKGRFTISADNSKNTAYLQMNSLKPEDTAVYYCARGGGWVPSSTSESLNWYFDRW |
| | | GQGTLVTVSS |
| 4A-41 | 2434 | EVQLVESGGGLVQPGGSLRLSCAASGRTFGDYIMGWFRQAPGKERESVAAINWSGGTTPY |
| | | ADSVKGRFTISADNSKNTAYLQMNSLKPEDTAVYYCATDPPLFCCHVDLWGQGTLVTVS |
| | | S |
| 4A-74 | 2435 | EVQLVESGGGLVQPGGSLRLSCAASGLTFSDDTMGWFRQAPGKEREFVAAVSWSGGNTY |
| | | YADSVKGRFTISADNSKNTAYLQMNSLKPEDTAVYYCATDPPLFWGQGTLVTVSS |
| 4A-75 | 2436 | EVQLVESGGGLVQPGGSLRLSCAASGRTFGDDTMGWFRQAPGKEREFVAAINWTGGYTP |
| | | YADSVKGRFTISADNSKNTAYLQMNSLKPEDTAVYYCATDPPLFWGQGTLVTVSS |
| 4A-31 | 2437 | EVQLVESGGGLVQPGGSLRLSCAASGRTFGDYIMGWFRQAPGKEREFVATINWTAGYTY |
| | | YADSVKGRFTISADNSKNTAYLQMNSLKPEDTAVYYCATDPPLFCWHFDHWGQGTLVTV |
| | | SS |
| 4A-32 | 2438 | EVQLVESGGGLVQPGGSLRLSCAASGRTFGDDTMGWFRQAPGKEREFVAAINWSGGNTD |
| | | YADSVKGRFTISADNSKNTAYLQMNSLKPEDTAVYYCATDPPLFWGQGTLVTVSS |
| 4A-15 | 2439 | EVQLVESGGGLVQPGGSLRLSCAASGRTFGDYTMGWFRQAPGKEREFVAAINWSGGNTY |
| | | YADSVKGRFTISADNSKNTAYLQMNSLKPEDTAVYYCATDPPLFWGQGTLVTVSS |
| 4A-14 | 2440 | EVQLVESGGGLVQPGGSLRLSCAASGRTFSDDTMGWFRQAPGKEREFVAGINWSGNGVY |
| | | YADSVKGRFTISADNSKNTAYLQMNSLKPEDTAVYYCATDPPLFWGQGTLVTVSS |
| 4A-76 | 2441 | EVQLVESGGGLVQPGGSLRLSCAASGRTFGDYAMGWFRQAPGKERELVAPINWSGGSTY |
| | | YADSVKGRFTISADNSKNTAYLQMNSLKPEDTAVYYCATDPPLFWGQGTLVTVSS |
| 4A-50 | 2442 | EVQLVESGGGLVQPGGSLRLSCAASGGTFSNSGMGWFRQAPGKERELVAVVNWSGRRTY |
| | | YADSVKGRFTISADNSKNTAYLQMNSLKPEDTAVYYCAVPWMDYNRRDWGQGTLVTVS |
| | | S |
| 4A-17 | 2443 | EVQLVESGGGLVQPGGSLRLSCAASGQLANFASYAMGWFRQAPGKEREFVAAITRSGSST |
| | | VYADSVKGRFTISADNSKNTAYLQMNSLKPEDTAVYYCATTMNPNPRWGQGTLVTVSS |
| 4A-37 | 2444 | EVQLVESGGGLVQPGGSLRLSCAASGRTFSDDIMGWFRQAPGKEREFVAAINWTGGSTYY |
| | | ADSVKGRFTISADNSKNTAYLQMNSLKPEDTAVYYCATDPPLFWGQGTLVTVSS |
| 4A-44 | 2445 | EVQLVESGGGLVQPGGSLRLSCAASGRTFGDYIMGWFRQAPGKEREIVAAINWSAGYTA |
| | | YADSVKGRFTISADNSKNTAYLQMNSLKPEDTAVYYCATARPNTGWHFDHWGQGTLVT |
| | | VSS |
| 4A-77 | 2446 | EVQLVESGGGLVQPGGSLRLSCAASGRTFSDDTMGWFRQAPGKEREWVGSINWSGGSTY |
| | | YADSVKGRFTISADNSKNTAYLQMNSLKPEDTAVYYCATDPPLFWGQGTLVTVSS |
| 4A-78 | 2447 | EVQLVESGGGLVQPGGSLRLSCAASGRTFSDDTMGWFRQAPGKEREFVAGMTWSGSSTF |
| | | YADSVKGRFTISADNSKNTAYLQMNSLKPEDTAVYYCATDPPLFWGQGTLVTVSS |
| 4A-79 | 2448 | EVQLVESGGGLVQPGGSLRLSCAASGRTFGDYIMGWFRQAPGKERECVAAINWSGDYTD |
| | | YADSVKGRFTISADNSKNTAYLQMNSLKPEDTAVYYCATDPPLFWGQGTLVTVSS |
| 4A-8 | 2449 | EVQLVESGGGLVQPGGSLRLSCAASGRTFGDYIMGWFRQAPGKEREFVGGINWSGGYTY |
| | | YADSVKGRFTISADNSKNTAYLQMNSLKPEDTAVYYCATDPPLFWGQGTLVTVSS |
| 4A-81 | 2450 | EVQLVESGGGLVQPGGSLRLSCAASGRTFSDDTMGWFRQAPGKEREFVAAVNWSGGSTY |
| | | YADSVKGRFTISADNSKNTAYLQMNSLKPEDTAVYYCATDPPLFWGQGTLVTVSS |
| 4A-82 | 2451 | EVQLVESGGGLVQPGGSLRLSCAASGRTFGDYAMGWFRQAPGKEREFVAAINWSGGYTR |
| | | YADSVKGRFTISADNSKNTAYLQMNSLKPEDTAVYYCATDPPLFWGQGTLVTVSS |
| 4A-83 | 2452 | EVQLVESGGGLVQPGGSLRLSCAASGRTFGDDTMGWFRQAPGKEREFVAAINWSGGYTP |
| | | YADSVKGRFTISADNSKNTAYLQMNSLKPEDTAVYYCATDPPLFWGQGTLVTVSS |
| 4A-35 | 2453 | EVQLVESGGGLVQPGGSLRLSCAASGRTFGDYIMGWFRQAPGKERESVAAINWSAGYTA |
| | | YADSVKGRFTISADNSKNTAYLQMNSLKPEDTAVYYCARASPNTGWHFDRWGQGTLVT |
| | | VSS |
| 4A-45 | 2454 | EVQLVESGGGLVQPGGSLRLSCAASGRTFGDYIMGWFRQAPGKEREFVAAINWSGGYTH |
| | | YADSVKGRFTISADNSKNTAYLQMNSLKPEDTAVYYCATDPPLFWGQGTLVTVSS |
| 4A-84 | 2455 | EVQLVESGGGLVQPGGSLRLSCAASGRTFSDDTMGWFRQAPGKEREFVAAITWSGGRTR |
| | | YADSVKGRFTISADNSKNTAYLQMNSLKPEDTAVYYCATDRPLFWGQGTLVTVSS |
| 4A-85 | 2456 | EVQLVESGGGLVQPGGSLRLSCAASGRTFGDYIMGWFRQAPGKERESVAAINWSGGYTA |
| | | YADSVKGRFTISADNSKNTAYLQMNSLKPEDTAVYYCATASPNTGWHFDHWGQGTLVT |
| | | VSS |
| 4A-86 | 2457 | EVQLVESGGGLVQPGGSLRLSCAASGRTFSDDTMGWFRQAPGKEREFVAAIHWSGSSTRY |
| | | ADSVKGRFTISADNSKNTAYLQMNSLKPEDTAVYYCATDPPLFWGQGTLVTVSS |
| 4A-87 | 2458 | EVQLVESGGGLVQPGGSLRLSCAASGRTFSDYTMGWFRQAPGKEREWVAAINWSGGTTY |
| | | YADSVKGRFTISADNSKNTAYLQMNSLKPEDTAVYYCATDPPLFWGQGTLVTVSS |
| 4A-88 | 2459 | EVQLVESGGGLVQPGGSLRLSCAASGRTFGDDTMGWFRQAPGKEREFVAAINWSGDNTH |
| | | YADSVKGRFTISADNSKNTAYLQMNSLKPEDTAVYYCATDPPLFWGQGTLVTVSS |
| 4A-89 | 2460 | EVQLVESGGGLVQPGGSLRLSCAASGFAFGDNWIGWFRQAPGKEREWVASISSGGTTAY |
| | | ADNVKGRFTIIADNSKNTAYLQMNSLKPEDTAVYYCAHRGGWLRPWGYWGQGTLVTVS |
| | | S |
| 4A-9 | 2461 | EVQLVESGGGLVQPGGSLRLSCAASGRTFSDDAMGWFRQAPGKEREFVGRINWSGGNTY |
| | | YADSVKGRFTISADNSKNTAYLQMNSLKPEDTAVYYCATDPPLFWGQGTLVTVSS |
| 4A-91 | 2462 | EVQLVESGGGLVQPGGSLRLSCAASGRTFSDDTMGWFRQAPGKEREFVGGISWSGGNTY |
| | | YADSVKGRFTISADNSKNTAYLQMNSLKPEDTAVYYCATDPPLFWGQGTLVTVSS |
| 4A-92 | 2463 | EVQLVESGGGLVQPGGSLRLSCAASGRTFSDDTMGWFRQAPGKEREFVAAINWSGGSTY |
| | | YADSVKGRFTISADNSKNTAYLQMNSLKPEDTAVYYCATDPPLFWGQGTLVTVSS |
| 4A-46 | 2464 | EVQLVESGGGLVQPGGSLRLSCAASGRTFGDDTMGWFRQAPGKEREFVAAINWSGGYTY |
| | | YADSVKGRFTISADNSKNTAYLQMNSLKPEDTAVYYCATDPPLFWGQGTLVTVSS |
| 4A-20 | 2465 | EVQLVESGGGLVQPGGSLRLSCAASGRTFGDYIMGWFRQAPGKEREFVAAINWSADYTA |
| | | YADSVKGRFTISADNSKNTAYLQMNSLKPEDTAVYYCATDPPLFCWHFDHWGQGTLVTV |
| | | SS |
| 4A-93 | 2466 | EVQLVESGGGLVQPGGSLRLSCAASGRTFSDDAMGWFRQAPGKEREFVAAINWSGSSTY |
| | | YADSVKGRFTISADNSKNTAYLQMNSLKPEDTAVYYCATDPPLFWGQGTLVTVSS |
| 4A-4 | 2467 | EVQLVESGGGLVQPGGSLRLSCAASGRTFGDYIMGWFRQAPGKEREMVAAINWIAGYTA |
| | | DADSVRRLFTITADNNKNTAHLMMNLLKPENTAVYYCAEPSPNTGWHFDHWGQGTLVT |
| | | VSS |
| 4A-2 | 2468 | EVQLVESGGGLVQPGGSLRLSCAASGRTFGDDTMGWFRQAPGKEREFVAAINWSGGNTP |
| | | YADSVKGRFTISADNSKNTAYLQMNSLKPEDTAVYYCATDPPLFWGQGTLVTVSS |
| 4A-94 | 2469 | EVQLVESGGGLVQPGGSLRLSCAASGRTFSDDTMGWFRQAPGKEREFVAAINWSGDNTH |
| | | YADSVKGRFTISADNSKNTAYLQMNSLKPEDTAVYYCATDPPLFWGQGTLVTVSS |
| 4A-95 | 2470 | EVQLVESGGGLVQPGGSLRLSCAASGRTFGDYIMGWFRQAPGKEREIVAAINWSAGYTA |
| | | YADSVKGRFTISADNSKNTAYLQMNSLKPEDTAVYYCATAPPLFCWHFDHWGQGTLVTV |
| | | SS |
| 4A-12 | 2471 | EVQLVESGGGLVQPGGSLRLSCAASGFTFGDYVMGWFRQAPGKEREIVAAINWNAGYTA |
| | | YADSVRGLFTITADNSKNTAYLQMNSLKPEDTAVYYCAKASPNTGWHFDHWGQGTLVT |
| | | VSS |
| 4A-30 | 2472 | EVQLVESGGGLVQPGGSLRLSCAASGRTFGDYTMGWFRQAPGKEREFVAAINWTGGYTY |
| | | YADSVKGRFTISADNSKNTAYLQMNSLKPEDTAVYYCATDPPLFWGQGTLVTVSS |
| 4A-27 | 2473 | EVQLVESGGGLVQPGGSLRLSCAASGRTFGDYIMGWFRQAPGKEREIVAAINWSAGYTA |
| | | YADSVKGLFTITADNSKNTAYLQMNILKPEDTAVYYCARATPNTGWHFDHWGQGTLVT |
| | | VSS |
| 4A-22 | 2474 | EVQLVESGGGLVQPGGSLRLSCAASGRTFGDYIMGWFRQAPGKEREFVAAINWSGDNTH |
| | | YADSVKGRFTISADNSKNTAYLQMNSLKPEDTAVYYCATDPPLFWGQGTLVTVSS |
| 4A-96 | 2475 | EVQLVESGGGLVQPGGSLRLSCAASGRTFGDYIMGWFRQAPGKEREIVAAINWSAGYTPY |
| | | ADSVKGRFTISADNSKNTAYLQMNSLKPEDTAVYYCATDPPLFCCHFDHWGQGTLVTVS |
| | | S |
| 4A-97 | 2476 | EVQLVESGGGLVQPGGSLRLSCAASGRTFGDYIMGWFRQAPGKERESVAAINWSAGYTA |
| | | YADSVKGRFTISADNSKNTAYLQMNSLKPEDTAVYYCATAPPNTGWHFDHWGQGTLVT |
| | | VSS |
| 4A-98 | 2477 | EVQLVESGGGLVQPGGSLRLSCAASGFTWGDYTMGWFRQAPGKEREFVAAINWSGGNT |
| | | YYADSVKGRFTISADNSKNTAYLQMNSLKPEDTAVYYCAADRRGLASTRAADYDWGQG |
| | | TLVTVSS |
| 4A-99 | 2478 | EVQLVESGGGLVQPGGSLRLSCAASGIPSTLRAMGWFRQAPGKEREFVAAVSSLGPFTRY |
| | | ADSVKGRFTISADNSKNTAYLQMNSLKPEDTAVYYCAAKPGWVARDPSQYNWGQGTLV |
| | | TVSS |
| 4A-100 | 2479 | EVQLVESGGGLVQPGGSLRLSCAASGFSFDDDYVMGWFRQAPGKEREFVAAINWSGGST |
| | | YYADSVKGRFTISADNSKNTAYLQMNSLKPEDTAVYYCAADRRGLASTRAADYDWGQG |
| | | TLVTVSS |
| 4A-101 | 2480 | EVQLVESGGGLVQPGGSLRLSCAASGRTFSNAAMGWFRQAPGKEREFVARILWTGASRS |
| | | YADSVKGRFTISADNSKNTAYLQMNSLKPEDTAVYYCATTENPNPRWGQGTLVTVSS |
| 4A-102 | 2481 | EVQLVESGGGLVQPGGSLRLSCAASGGTFGVYHMGWFRQAPGKEREGVAAINMSGDDS |
| | | AYADSVKGRFTISADNSKNTAYLQMNSLKPEDTAVYYCAILVGPGQVEFDHWGQGTLVT |
| | | VSS |
| 4A-103 | 2482 | EVQLVESGGGLVQPGGSLRLSCAASGFTFSSYYMGWFRQAPGKEREFVARI -- |
| | | SGSTFYADSVKGRFTISADNSKNTAYLQMNSLKPEDTAVYYCAALPFVCPSGSYSDYGDE |
| | | YDWGQGTLVTVSS |
| 4A-104 | 2483 | EVQLVESGGGLVQPGGSLRLSCAASGRTFSGDFMGWFRQAPGKEREFVGRINWSGGNTY |
| | | YADSVRGLFTITADNNKNTAYLMMNLLKPEDTAVYYCPTDPPLFWGLGTLVTWSS |
| 4A-105 | 2484 | EVQLVESGGGLVQPGGSLRLSCAASGSTLRDYAMGWFRQAPGKERESVAAITWSGGSTA |
| | | YADSVKGRFTISADNSKNTAYLQMNSLKPEDTAVYYCASLLAGDRYFDYWGQGTLVTVS |
| | | S |
| 4A-106 | 2485 | EVQLVESGGGLVQPGGSLRLSCAASGFTFDDYTMGWFRQAPGKEREFVAAITDNGGSKY |
| | | YADSVKGRFTISADNSKNTAYLQMNSLKPEDTAVYYCAADRRGLASTRAADYDWGQGT |
| | | LVTVSS |
| 4A-107 | 2486 | EVQLVESGGGLVQPGGSLRLSCAASGGTFSSYGMGWFRQAPGKEREFVAAINWSGASTY |
| | | YADSVKGRFTISADNSKNTAYLQMNSLKPEDTAVYYCARDWRDRTWGNSLDYWGQGTL |
| | | VTVSS |
| 4A-108 | 2487 | EVQLVESGGGLVQPGGSLRLSCAASGFSFDDDYVMGWFRQAPGKEREFVAAISWSEDNT |
| | | YYADSVKGRFTISADNSKNTAYLQMNSLKPEDTAVYYCAADRRGLASTRAADYDWGQG |
| | | TLVTVSS |
| 4A-109 | 2488 | EVQLVESGGGLVQPGGSLRLSCAASGFSFDDDYVMGWFRQAPGKEREFVAAVSGSGDDT |
| | | YYADSVKGRFTISADNSKNTAYLQMNSLKPEDTAVYYCAADRRGLASTRAADYDWGQG |
| | | TLVTVSS |
| 4A-110 | 2489 | EVQLVESGGGLVQPGGSLRLSCAASGNIAAINVMGWFRQAPGKEREFVAAISASGRRTDY |
| | | ADSVKGRFTISADNSKNTAYLQMNSLKPEDTAVYYCARRVYYYDSSGPPGVTFDIWGQG |
| | | TLVTVSS |
| 4A-111 | 2490 | EVQLVESGGGLVQPGGSLRLSCAASGIITSRYVMGWFRQAPGKEREGVAAISTGGSTIYAD |
| | | SVKGRFTISADNSKNTAYLQMNSLKPEDTAVYYCARQDSSSPYFDYWGQGTLVTVSS |
| 4A-112 | 2491 | EVQLVESGGGLVQPGGSLRLSCAASGFSFDDDYVMGWFRQAPGKEREFVAAISNSGLSTY |
| | | YADSVKGRFTISADNSKNTAYLQMNSLKPEDTAVYYCAADRRGLASTRAADYDWGQGT |
| | | LVTVSS |
| 4A-113 | 2492 | EVQLVESGGGLVQPGGSLRLSCAASGSISSINVMGWFRQAPGKEREFVATMRWSTGSTYY |
| | | ADSVKGRFTISADNSKNTAYLQMNSLKPEDTAVYYCAQRVRGFFGPLRTTPSWYEWGQG |
| | | TLVTVSS |
| 4A-114 | 2493 | EVQLVESGGGLVQPGGSLRLSCAASGLTFILYRMGWFRQAPGKEREFVAAINNFGTTKYA |
| | | DSVKGRFTISADNSKNTAYLQMNSLKPEDTAVYYCARTHYDFWSGYTSRTPNYFDYWGQ |
| | | GTLVTVSS |
| 4A-115 | 2494 | EVQLVESGGGLVQPGGSLRLSCAASGGTFSVYHMGWFRQAPGKEREPVAAISWSGGSTA |
| | | YADSVKGRFTISADNSKNTAYLQMNSLKPEDTAVYYCAAVNTWTSPSFDSWGQGTLVTV |
| | | SS |
| 4A-116 | 2495 | EVQLVESGGGLVQPGGSLRLSCAASGRAFSTYGMGWFRQAPGKEREFVAGINWSGDTPY |
| | | YADSVKGRFTISADNSKNTAYLQMNSLKPEDTAVYYCAREVGPPPGYFDLWGQGTLVTV |
| | | SS |
| 4A-117 | 2496 | EVQLVESGGGLVQPGGSLRLSCAASGRTFSDIAMGWFRQAPGKEREFVASINWGGGNTY |
| | | YADSVKGRFTISADNSKNTAYLQMNSLKPEDTAVYYCAAKGIWDYLGRRDFGDWGQGT |
| | | LVTVSS |
| 4A-118 | 2497 | EVQLVESGGGLVQPGGSLRLSCAASGRTFSSARMGWFRQAPGKEREFVAAISWSGDNTH |
| | | YADSVKGRFTISADNSKNTAYLQMNSLKPEDTAVYYCATTENPNPRWGQGTLVTVSS |
| 4A-119 | 2498 | EVQLVESGGGLVQPGGSLRLSCAASGFAFSSYAMGWFRQAPGKEREWVATINGDDYTYY |
| | | ADSVKGRFTISADNSKNTAYLQMNSLKPEDTAVYYCVATPGGYGLWGQGTLVTVSS |
| 4A-120 | 2499 | EVQLVESGGGLVQPGGSLRLSCAASGITFRRHDMGWFRQAPGKEREFVAAIRWSSSSTVY |
| | | ADSVKGRFTISADNSKNTAYLQMNSLKPEDTAVYYCAADRGVYGGRWYRTSQYTWGQG |
| | | TLVTVSS |
| 4A-121 | 2500 | EVQLVESGGGLVQPGGSLRLSCAASGTAASFNPMGWFRQAPGKEREFVAAITSGGSTNYA |
| | | DSVKGRFTISADNSKNTAYLQMNSLKPEDTAVYYCAAIAYEEGVYRWDWGQGTLVTVSS |
| 4A-122 | 2501 | EVQLVESGGGLVQPGGSLRLSCAASGNINIINYMGWFRQAPGKEREGVAAIHWNGDSTAY |
| | | ADSVKGRFTISADNSKNTAYLQMNSLKPEDTAVYYCASGPPYSNYFAYWGQGTLVTVSS |
| 4A-123 | 2502 | EVQLVESGGGLVQPGGSLRLSCAASGFTFDDYAMGWFRQAPGKERESVAAISGSGGSTAY |
| | | ADSVKGRFTISADNSKNTAYLQMNSLKPEDTAVYYCAKIMGSGRPYFDHWGQGTLVTVS |
| | | S |
| 4A-124 | 2503 | EVQLVESGGGLVQPGGSLRLSCAASGNIFTRNVMGWFRQAPGKEREFVAAITSSGSTNYA |
| | | DSVKGRFTISADNSKNTAYLQMNSLKPEDTAVYYCARPSSDLQGGVDYWGQGTLVTVSS |
| 4A-125 | 2504 | ADSVKGRFTISADNSKNTAYLQMNSLKPEDTAVYYCAAKGIWDYLGRRDFGDWGQGTL |
| | | VTVSS |
| 4A-126 | 2505 | EVQLVESGGGLVQPGGSLRLSCAASGIPSTLRAMGWFRQAPGKEREFVAAVSSLGPFTRY |
| | | ADSVKGRFTISADNSKNTAYLQMNSLKPEDTAVYYCAAKPGWVARDPSEYNWGQGTLV |
| | | TVSS |
| 4A-127 | 2506 | EVQLVESGGGLVQPGGSLRLSCAASGFTLDDSAMGWFRQAPGKEREWVAAITNGGSTYY |
| | | ADSVKGRFTISADNSKNTAYLQMNSLKPEDTAVYYCARFARGSPYFDFWGQGTLVTVSS |
| 4A-128 | 2507 | EVQLVESGGGLVQPGGSLRLSCAASGSISSFNAMGWFRQAPGKERESVAAIDWDGSTAYA |
| | | DSVKGRFTISADNSKNTAYLQMNSLKPEDTAVYYCARGGGYYGSGSFEYWGQGTLVTVS |
| | | S |
| 4A-129 | 2508 | EVQLVESGGGLVQPGGSLRLSCAASGNIFSDNIIGWFRQAPGKEREMVAYYTSGGSIDYAD |
| | | SVKGRFTISADNSKNTAYLQMNSLKPEDTAVYYCARGTAVGRPPPGGMDVWGQGTLVT |
| | | VSS |
| 4A-130 | 2509 | EVQLVESGGGLVQPGGSLRLSCAASGSISSIGAMGWFRQAPGKEREGVAAISSSGSSTVYA |
| | | DSVKGRFTISADNSKNTAYLQMNSLKPEDTAVYYCARVPPGQAYFDSWGQGTLVTVSS |
| 4A-131 | 2510 | EVQLVESGGGLVQPGGSLRLSCAASGFTFDDYGMGWFRQAPGKERELVATITWSGDSTY |
| | | YADSVKGRFTISADNSKNTAYLQMNSLKPEDTAVYYCAKGGSWYYDSSGYYGRWGQGT |
| | | LVTVSS |
| 4A-132 | 2511 | EVQLVESGGGLVQPGGSLRLSCAASGRTFSNYTMGWFRQAPGKEREWVSAISWSTGSTY |
| | | YADSVKGRFTISADNSKNTAYLQMNSLKPEDTAVYYCAADRYGPPWYDWGQGTLVTVS |
| | | S |
| 4A-133 | 2512 | EVQLVESGGGLVQPGGSLRLSCAASGSTNYMGWFRQAPGKEREGVAAISMSGDDTIYAD |
| | | SVKGRFTISADNSKNTAYLQMNSLKPEDTAVYYCARIGLRGRYFDLWGQGTLVTVSS |
| 4A-134 | 2513 | EVQLVESGGGLVQPGGSLRLSCAASGGTFSSVGMGWFRQAPGKERELVAVINWSGARTY |
| | | YADSVKGRFTISADNSKNTAYLQMNSLKPEDTAVYYCAVPWMDYNRRDWGQGTLVTVS |
| | | S |
| 4A-135 | 2514 | EVQLVESGGGLVQPGGSLRLSCAASGRIFTNTAMGWFRQAPGKEREGVAAINWSGGSTA |
| | | YADSVKGRFTISADNSKNTAYLQMNSLKPEDTAVYYCARTSGSYSFDYWGQGTLVTVSS |
| 4A-136 | 2515 | EVQLVESGGGLVQPGGSLRLSCAASGEEFSDHWMGWFRQAPGKEREFVGAIHWSGGRTY |
| | | YADSVKGRFTISADNSKNTAYLQMNSLKPEDTAVYYCAADRRGLASTRAADYDWGQGT |
| | | LVTVSS |
| 4A-137 | 2516 | EVQLVESGGGLVQPGGSLRLSCAASGRTFSSIAMGWFRQAPGKEREFVAAINWSGARTAY |
| | | ADSVKGRFTISADNSKNTAYLQMNSLKPEDTAVYYCAAKGIWDYLGRRDFGDWGQGTL |
| | | VTVSS |
| 4A-138 | 2517 | EVQLVESGGGLVQPGGSLRLSCAASGSTSSLRTMGWFRQAPGKEREGVAAISSRDGSTIYA |
| | | DSVKGRFTISADNSKNTAYLQMNSLKPEDTAVYYCARDDSSSPYFDYWGQGTLVTVSS |
| 4A-139 | 2518 | EVQLVESGGGLVQPGGSLRLSCAASGGGTFGSYAMGWFRQAPGKEREFVAAISIASGASG |
| | | GTTNYADSVKGRFTISADNSKNTAYLQMNSLKPEDTAVYYCATTMNPNPRWGQGTLVTV |
| | | SS |
| 4A-140 | 2519 | EVQLVESGGGLVQPGGSLRLSCAASGRTFSNAAMGWFRQAPGKEREFVARITWNGGSTF |
| | | YADSVKGRFTISADNSKNTAYLQMNSLKPEDTAVYYCATTENPNPRWGQGTLVTVSS |
| 4A-141 | 2520 | EVQLVESGGGLVQPGGSLRLSCAASGIILSDNAMGWFRQAPGKEREFVAAISWLGESTYY |
| | | ADSVKGRFTISADNSKNTAYLQMNSLKPEDTAVYYCAADRRGLASTRAADYDWGQGTL |
| | | VTVSS |
| 4A-142 | 2521 | EVQLVESGGGLVQPGGSLRLSCAASGRTFGDYIMGWFRQAPGKERESVAAINWNGGYTA |
| | | YADSVKGRFTISADNSKNTAYLQMNSLKPEDTAVYYCATTSPNTGWHYYRWGQGTLVT |
| | | VSS |
| 4A-143 | 2522 | EVQLVESGGGLVQPGGSLRLSCAASGFNFNWYPMGWFRQAPGKERESVAAISWTGVSTY |
| | | TAYADSVKGRFTISADNSKNTAYLQMNSLKPEDTAVYYCARWGPGPAGGSPGLVGFDY |
| | | WGQGTLVTVSS |
| 4A-144 | 2523 | EVQLVESGGGLVQPGGSLRLSCAASGSIRSVSVMGWFRQAPGKEREAVAAISWSGVGTA |
| | | YADSVKGRFTISADNSKNTAYLQMNSLKPEDTAVYYCAAYQRGWGDWGQGTLVTVSS |
| 4A-145 | 2524 | EVQLVESGGGLVQPGGSLRLSCAASGMTFRLYAMGWFRQAPGKEREFVGAINWLSESTY |
| | | YADSVKGRFTISADNSKNTAYLQMNSLKPEDTAVYYCAAKPGWVARDPSEYNWGQGTL |
| | | VTVSS |
| 4A-146 | 2525 | EVQLVESGGGLVQPGGSLRLSCAASGRTFSDDAMGWFRQAPGKEREFVAAINWSGGSTY |
| | | YADSVKGRFTISADNSKNTAYLQMNSLKPEDTAVYYCATDPPLFWGQGTMVTVSS |
| 4A-147 | 2526 | EVQLVESGGGLVQPGGSLRLSCAASGGTFSVYAMGWFRQAPGKEREGVAAISMSGDDAA |
| | | YADSVKGRFTISADNSKNTAYLQMNSLKPEDTAVYYCAKISKDDGGKPRGAFFDSWGQG |
| | | TLVTVSS |
| 4A-148 | 2527 | EVQLVESGGGLVQPGGSLRLSCAASGFALGYYAMGWFRQAPGKERESVAAISSRDGSTA |
| | | YADSVKGRFTISADNSKNTAYLQMNSLKPEDTAVYYCARLATGPQAYFHHWGQGTLVT |
| | | VSS |
| 4A-149 | 2528 | EVQLVESGGGLVQPGGSLRLSCAASGFNLDDYAMGWFRQAPGKERESVAAISWDGGATA |
| | | YADSVKGRFTISADNSKNTAYLQMNSLKPEDTAVYYCARVGRGTTAFDSWGQGTLVTVS |
| | | S |
| 4A-150 | 2529 | EVQLVESGGGLVQPGGSLRLSCAASGNTFSGGFMGWFRQAPGKEREFVASIRSGARTYYA |
| | | DSVKGRFTISADNSKNTAYLQMNSLKPEDTAVYYCAQRVRGFFGPLRTTPSWYEWGQGT |
| | | LVTVSS |
| 4A-151 | 2530 | EVQLVESGGGLVQPGGSLRLSCAASGSIRSINIMGWFRQAPGKEREAVAAISWSGGSTVYA |
| | | DSVKGRFTISADNSKNTAYLQMNSLKPEDTAVYYCASLLAGDRYFDYWGQGTLVTVSS |
| 5A-1 | 2531 | EVQLVESGGGLVQPGGSLRLSCAASGGTFSSIGMGWFRQAPGKEREFVAAISWDGGATAY |
| | | ADSVKGRFTISADNSKNTAYLQMNSLKPEDTAVYYCAKEDVGKPFDWGQGTLVTVSS |
| 5A-2 | 2532 | EVQLVESGGGLVQPGGSLRLSCAASGLRFDDYAMGWFRQAPGKERELVAIKFSGGTTDY |
| | | ADSVKGRFTISADNSKNTAYLQMNSLKPEDTAVYYCASWDGLIGLDAYEYDWGQGTLVT |
| | | VSS |
| 5A-3 | 2533 | EVQLVESGGGLVQPGGSLRLSCAASGSIFSIDVMGWFRQAPGKEREFVAGISWSGDSTLYA |
| | | DSVKGRFTISADNSKNTAYLQMNSLKPEDTAVYYCAAFDGYTGSDWGQGTLVTVSS |
| 5A-4 | 2534 | EVQLVESGGGLVQPGGSLRLSCAASGFTLADYAMGWFRQAPGKEREFVAVITCSGGSTD |
| | | YADSVKGRFTISADNSKNTAYLQMNSLKPEDTAVYYCAADDCYIGCGWGQGTLVTVSS |
| 5A-5 | 2535 | EVQLVESGGGLVQPGGSLRLSCAASGRTFSSIAMGWFRQAPGKERELVAEITEGGISPSGD |
| | | NIYYADSVKGRFTISADNSKNTAYLQMNSLKPEDTAVYYCAAELHSSDYTSPGAESDYG |
| | | WGQGTLVTVSS |
| 5A-6 | 2536 | EVQLVESGGGLVQPGGSLRLSCAASGPTFSSYAMMGWFRQAPGKEREWVAAINNFGTTK |
| | | YADSVKGRFTISADNSKNTAYLQMNSLKPEDTAVYYCAASASDYGLGLELFHDEYNWGQ |
| | | GTLVTVSS |
| 5A-7 | 2537 | EVQLVESGGGLVQPGGSLRLSCAASGSTGYMGWFRQAPGKEREFVAAIHSGGSTNYADS |
| | | VKGRFTISADNSKNTAYLQMNSLKPEDTAVYYCATVATALIWGQGTLVTVSS |
| 5A-8 | 2538 | EVQLVESGGGLVQPGGSLRLSCAASGRPFSEYTMGWFRQAPGKEREFVSSIHWGGRGTNY |
| | | ADSVKGRFTISADNSKNTAYLQMNSLKPEDTAVYYCAAELHSSDYTSPGAYAWGQGTLV |
| | | TVSS |
| 5A-9 | 2539 | EVQLVESGGGLVQPGGSLRLSCAASGLTLSTYGMGWFRQAPGKEREFVAHIPRSTYSPYY |
| | | ADSVKGRFTISADNSKNTAYLQMNSLKPEDTAVYYCAAIGDGAVWGQGTLVTVSS |
| 5A-10 | 2540 | EVQLVESGGGLVQPGGSLRLSCAASGFTFNNHNMGWFRQAPGKEREFVAAISSYSHTAYA |
| | | DSVKGRFTISADNSKNTAYLQMNSLKPEDTAVYYCALQPFGASNYRWGQGTLVTVSS |
| 5A-11 | 2541 | EVQLVESGGGLVQPGGSLRLSCAASGGIYRVMGWFRQAPGKERELVASISSGGGINYADS |
| | | VKGRFTISADNSKNTAYLQMNSLKPEDTAVYYCAAESWGRQWGQGTLVTVSS |
| 5A-12 | 2542 | EVQLVESGGGLVQPGGSLRLSCAASGYTDSNLWMGWFRQAPGKEREFVAINRSTGSTSY |
| | | ADSVKGRFTISADNSKNTAYLQMNSLKPEDTA VYYCATSGSGSPNWGQGTLVTVSS |
| 5A-13 | 2543 | EVQLVESGGGLVQPGGSLRLSCAASGFTFDYYTMGWFRQAPGKEREFVAAIRSSGGLFYA |
| | | DSVKGRFTISADNSKNTAYLQMNSLKPEDTAVYYCAAYLDGYSGSWGQGTLVTVSS |
| 5A-14 | 2544 | EVQLVESGGGLVQPGGSLRLSCAASGGIFSINVMGWFRQAPGKEREWVSAIRWNGGNTA |
| | | YADSVKGRFTITADNSKNTAYLQMNSLKPEDTAVYYCAGFDGYTGSDWGQGTLVTVSS |
| 5A-15 | 2545 | EVQLVESGGGLVQPGGSLRLSCAASGFTFDGAAMGWFRQAPGKEREFVATIRWTNSTDY |
| | | ADSVKGRFTISADNSKNTAYLQMNSLKPEDTAVYYCARGRYGIVERWGQGTLVTVSS |
| 5A-16 | 2546 | EVQLVESGGGLVQPGGSLRLSCAASGRTHSIYPMGWFRQAPGKERELVAAIHSGGATVYA |
| | | DSVKGRFTISADNSKNTAYLQMNSLKPEDTAVYYCAARRWIPPGPIWGQGTLVTVSS |
| 5A-17 | 2547 | EVQLVESGGGLVQPGGSLRLSCAASGPTFSIYAMGWFRQAPGKEREFVAGIRWSDVYTQY |
| | | ADSVKGRFTISADNSKNTAYLQMNSLKPEDTAVYYCALDIDYRDWGQGTLVTVSS |
| 5A-18 | 2548 | EVQLVESGGGLVQPGGSLRLSCAASGLTFDDNIHVMGWFPQAPGKEREFVAAIHWSGGST |
| | | IYADSVKGRFTINADNSKNTAYLQMNSLKPEDTAVYYCAADVYPQDYGLGYVEGKMYY |
| | | GMDWGQGTLVTVSS |
| 5A-19 | 2549 | EVQLVESGGGLVQPGGSLRLSCAASGLTLDYYAMGWFRQAPGKEREWVASINWSGGSTY |
| | | YADSVKGRFTISADNSKNTAYLQMNSLKPEDTAVYYCAAYGSGEFDWGQGTLVTVSS |
| 5A-20 | 2550 | EVQLVESGGGLVQPGGSLRLSCAASGRTIVPYTMGWFRQAPGKERELVAAISPSAFTEYA |
| | | DSVKGRFTISADNSKNTAYLQMNSLKPEDTAVYYCAARRWGYDWGQGTLVTVSS |
| 5A-21 | 2551 | EVQLVESGGGLVQPGGSLRLSCAASGGTFTTYHMGWFRQAPGKEREFVAHISTGGATNY |
| | | ADSVKGRFTISADNSKNTAYLQMNSLKPEDTAVYYCATFPAIVTDSDYDLGNDWGQGTL |
| | | VTVSS |
| 5A-22 | 2552 | EVQLVESGGGLVQPGGSLRLSCAASGFTFNVFAMGWFRQAPGKEREFVAAINWSDSRTD |
| | | YADSVKGRFTISADNSKNTAYLQMNSLKPEDTAVYYCASGSDNRARELSRYEYVWGQGT |
| | | LVTVSS |
| 5A-23 | 2553 | EVQLVESGGGLVQPGGSLRLSCAASGSIFSIDVMGWFRQAPGKEREFVAAISWSGESTLYA |
| | | DSVKGRFTISADNSKNTAYLQMNSLKPEDTAVYYCAAFDGYSGSDWGQGTLVTVSS |
| 5A-24 | 2554 | EVQLVESGGGLVQPGGSLRLSCAASGFTFSSYSMGWFRQAPGKEREFVAAISSYSHTAYA |
| | | DSVKGRFTIIADNSKNTAYLQMNSLKPEDTAVYYCALQPFGASSYRWGQGTLVTVSS |
| 5A-25 | 2555 | EVQLVESGGGLVQPGGSLRLSCAASGNTFSINVMGWFRQAPGKEREFVAAIHWSGDSTLY |
| | | ADSGKGRFTIIADNNKNTAYLQMISLKPEDTAVYYCAAFDGYSGNHWGQGTLVTVSS |
| 5A-26 | 2556 | EVQLVESGGGLVQPGGSLRLSCAASGRTISSYIMGWFRQAPGKERELVARIYTGGDTIYAD |
| | | SVKGRFTISADNSKNTAYLQMNSLKPEDTAVYYCAARTSYNGRYDYIDDYSWGQGTLVT |
| | | VSS |
| 5A-27 | 2557 | EVQLVESGGGLVQPGGSLRLSCAASGRANSINWMGWFRQAPGKEREFVATITPGGNTNY |
| | | ADSVKGRFTISADNSKNTAYLQMNSLKPEDTAVYYCAAAAGSTWYGTLYEYDWGQGTL |
| | | VTVSS |
| 5A-28 | 2558 | EVQLVESGGGLVQPGGSLRLSCAASGGTFSVFAMGWFRQVPGKERELVAEITAGGSTYYA |
| | | DSVKGRFTISADNSKNTAYLQMNSLKPEDTAVYYCAVDGPFGWGQGTLVTVSS |
| 5A-29 | 2559 | EVQLVESGGGLVQPGGSLRLSCAASGFTFDDYPMGWFRQAPGKEREGVASVLRGGYTW |
| | | YADSVKGRFTISADNSKNTAYLQMNSLKPEDTAVYYCAKDWATGLAWGQGTLVTVSS |
| 5A-30 | 2560 | EVQLVESGGGLVQPGGSLRLSCAASGFALGYYAMGWFRQAPGKEREFVAGIRWTDAYTE |
| | | YADSVKGRFTISADNSKNTAYLQMNSLKPEDTAVYYCAADVSPSYGSRWYWGQGTLVT |
| | | VSS |
| 5A-31 | 2561 | EVQLVESGGGLVQPGGSLRLSCAASGRTLDIHVMGWFRQAPGKEREFVA VINWTGESTLY |
| | | ADSVKGRFTISADNSKNTAYLQMNSLKPEDTAVYYCAAFDGYTGNYWGQGTLVTVSS |
| 5A-32 | 2562 | EVQLVESGGGLVQPGGSLRLSCAASGFTPDNYAMGWFRQAPGKEREFVAALGWSGVTTY |
| | | HYYADSVKGRFTISADNSKNTAYLQMNSLKPEDTAVYYCASDESDAANWGQGTLVTVSS |
| 5A-33 | 2563 | EVQLVESGGGLVQPGGSLRLSCAASGFTFDDYAMGWFRQAPGKERELVATIMWSGNTTY |
| | | YADSVRRRFIIRDNNNKNTAHLQMNSLKPEDTAVYYCATNDDDVWGQGTLVTVSS |
| 5A-34 | 2564 | EVQLVESGGGLVQPGGSLRLSCAASGRTFSRYIMGWFRQAPGKEREFVAAISWSGGDNTY |
| | | YADSVKGRFTISADNSKNTAYLQMNSLKPEDTAVYYCAAYRIVVGGTSPGDWRWGQGT |
| | | LVTVSS |
| 5A-35 | 2565 | EVQLVESGGGLVQPGGSLRLSCAASGPTFSIYAMGWFRQAPGKERELVAGISWNGGSTNY |
| | | ADSVKGRFTISADNSKNTAYLQMNSLKPEDTAVYYCALRRRFGGQEWGQGTLVTVSS |
| 5A-36 | 2566 | EVQLVESGGGLVQPGGSLRLSCAASGRTFSLNAMGWFRQAPGKERELVAAISCGGGSTYA |
| | | DNGKGRFTIITDNSKNTAYLQMMNLKPEDTAAYYCAADNDMGYCSWGQGTLVTVSS |
| 5A-37 | 2567 | EVQLVESGGGLVQPGGSLRLSCAASGSTFSINAMGWFRQAPGKEREFVGGISRSGATTNY |
| | | ADSVKGRFTISADNSKNTAYLQMNSLKPEDTAVYYCAADGVPEYSDYASGPVWGQGTLV |
| | | TVSS |
| 5A-38 | 2568 | EVQLVESGGGLVQPGGSLRLSCAASGRTFSMHAMGWFRQAPGKERELVASISSQGRTNY |
| | | ADSVKGRFTISADNSKNTAYLQMNSLKPEDTAVYYCAAEVRNGSDYLPIDWGQGTLVTV |
| | | SS |
| 5A-39 | 2569 | EVQLVESGGGLVQPGGSLRLSCAASGVTLDLYAMGWFRQAPGKEREFVAGIRWTDAYTE |
| | | YADSVKGRFTISADNSKNTAYLQMNSLKPEDTAVYYCAVDIDYRDWGQGTLVTVSS |
| 5A-40 | 2570 | EVQLVESGGGLVQPGGSLRLSCAASGLPFTINVMGWFRQAPGKEREFVAAIHWSGLTTFY |
| | | ADSVKGLFTITEDNSKNTAHLMMNLLKPEDTAVYCCAELDGYFFAHWGQGTLVTVSS |
| 5A-41 | 2571 | EVQLVESGGGLVQPGGSLRLSCAASGRAFSNYAMGWFRQAPGKEREFVAWINNRGTTDY |
| | | ADSGSTYYADSVKGRFTISADNSKNTAYLQMNSLKPEDTAVYYCASTDDYGVDWGQGT |
| | | LVTVSS |
| 5A-42 | 2572 | EVQLVESGGGLVQPGGSLRLSCAASGFTPDDYAMGWFRQAPGKEREFVASIGYSGRSNSY |
| | | NYYADSVKGRFTISADNSKNTAYLQMNSLKPEDTAVYYCAIAHGSSTYNWGQGTLVTVS |
| | | S |
| 5A-43 | 2573 | EVQLVESGGGLVQPGGSLRLSCAASGFTLNYYGMGWFPQAPGKEREFVAAITSGGAPHY |
| | | ADSVKGRFTINADNSKNTAYLQMNSLKPEDTAVYYCASAYDRGIGYDWGQGTLVTVSS |
| 5A-44 | 2574 | EVQLVESGGGLVQPGGSLRLSCAASGLPFSTKSMGWFRQAPGKEREFVAAIHWSGLTSYA |
| | | DSVKGRFTISADNSKNTAYLQMNSLKPEDTAVYYCAADRAADFFAQRDEYDWGQGTLV |
| | | TVSS |
| 5A-45 | 2575 | EVQLVESGGGLVQPGGSLRLSCAASGRTFSINAMGWFPQAPGKERELVAAISWSGESTQY |
| | | ADSVKGRFTISADNSKNTAYLQMNSLKPEDTAVYYCAAFDGGSGTQWGQGTLVTVSS |
| 5A-46 | 2576 | EVQLVESGGGLVQPGGSLRLSCAASGEEFSDHWMGWFRQAPGKEREFVAAIHWSGDSTH |
| | | RNYADSVKGRFTISADNSKNTAYLQMNSLKPEDTAVYYCATVGITLNWGQGTLVTVSS |
| 5A-47 | 2577 | EVQLVESGGGLVQPGGSLRLSCAASGFTFGSYDMGWFRQAPGKEREFVTAINWSGARTA |
| | | YADSVKGRFTISADNSKNTAYLQMNSLKPEDTAVYYCAARSVYSYEYNWGQGTLVTVSS |
| 5A-48 | 2578 | EVQLVESGGGLVQPGGSLRLSCAASGLPLDLYAMGWFPPAPGKELEFVAGIRWSDAYTEY |
| | | ADSVKGRFTINADNSKNPANLQMNSLKPEDTAVYYCALDIDYRHWGQGTLVTVSS |
| 5A-49 | 2579 | EVQLVESGGGLVQPGGSLRLSCAASGRTSTVNGMGWFRQAPGKEREFVASISQSGAATAY |
| | | ADSVKGRFTISADNSKNTAYLQMNSLKPEDTAVYYCAADRTYSYSSTGYYWGQGTLVTV |
| | | SS |
| 5A-50 | 2580 | EVQLVESGGGLVQPGGSLRLSCAASGFSLDYYGMGWFRQAPGKEREFVAAITSGGTPHY |
| | | ADSVKGRFTISADNSKNTAYLQMNSLKPEDTAVYYCASAYNPGIGYDWGQGTLVTVSS |
| 5A-51 | 2581 | EVQLVESGGGLVQPGGSLRLSCAASGRPNSINWMGWFRQAPGKERQFVATITPGGNTNY |
| | | ADSVKGRFTISADNSKNTAYLLMNSLKPEDTAVYYCAAAAGTTWYGTLYEYDWGQGTL |
| | | VTVSS |
| 5A-52 | 2582 | EVQLVESGGGLVQPGGSLRLSCAASGEKFSDHWMGWFRQAPGKEREFVATITFSGARTA |
| | | YADSVKGRFTISADNSKNTAYLQMNSLKPEDTAVYYCAALIKPSSTDRIFEEWGQGTLVT |
| | | VSS |
| 5A-53 | 2583 | EVQLVESGGGLVQPGGSLRLSCAASGLTVVPYAMGWFRQAPGKEREFVAAIRRSAVTNY |
| | | ADSVKGRFTIIADNSKNTAYLLMNSLKPEDTAVYYCAARRWGYHYWGQGTLVTVSS |
| 5A-54 | 2584 | EVQLVESGGGLVQPGGSLRLSCAASGTTFNFNVMGWFRQAPGKERELVAVISWTGESTLY |
| | | ADSVKGRFTISADNSKNTAYLQMNSLKPEDTAVYYCAAFDGYTGRDWGQGTLVTVSS |
| 5A-55 | 2585 | EVQLVESGGGLVQPGGSLRLSCAASGIDVNRNAMGWFRQAPGKEREFVAAITWSGGWRY |
| | | YADSVKGRFTISADNSKNTAYLQMNSLKPEDTAVYYCATTFGDAGIPDQYDFGWGQGTL |
| | | VTVSS |
| 5A-56 | 2586 | EVQLVESGGGLVQPGGSLRLSCAASGRTFSSNMGWFRQAPGKEREFVARIFGGDRTLYAD |
| | | SVKGRFTISADNSKNTAYLQMNSLKPEDTAVYYCADINGDWGQGTLVTVSS |
| 5A-57 | 2587 | EVQLVESGGGLVQPGGSLRLSCAASGGTFSMGWIRWVPQAQGKELEFMGCIGWITYYAD |
| | | YAKSRFSLFTDNADNTKNPPNMHMNPQKPEDTAVYYCAPFGWGQGTLVTVSS |
| 5A-58 | 2588 | EVQLVESGGGLVQPGGSLRLSCAASGCTLDYYAMGWFRQAPGKEREFVAGIRWTDAYTE |
| | | YADSVKGRFTISADNSKNTAYLQMNSLKPEDTAVYYCAADVSPSYGGRWYWGQGTLVT |
| | | VSS |
| 5A-59 | 2589 | EVQLVESGGGLVQPGGSLRLSCAASGLTFSLYRMCWFRQAPGKEREEVSCISNIDGSTYYA |
| | | DSVKGRFTISADNSKNTAYLQMNSLKPEDTAVYYCAADLLGDSDYEPSSGFGWGQGTLV |
| | | TVSS |
| 5A-60 | 2590 | EVQLVESGGGLVQPGGSLRLSCAASGRSFSSHRMGWFRQAPGKEREFVAAIMWSGSHRN |
| | | YADSVKGRFTISADNSKNTAYLQMNSLKPEDTAVYYCAAIAYEEGVYRWDWGQGTLVT |
| | | VSS |
| 5A-61 | 2591 | EVQLVESGGGLVQPGGSLRLSCAASGRIIVPNTMGWFRQAPGKERERVTGISPSAFTEYAD |
| | | SVKGRFTISADNSKNTAYLQMNSLKPEDTAVYYCAAHGWGCHWGQGTLVTVSS |
| 5A-62 | 2592 | EVQLVESGGGLVQPGGSLRLSCAASGSIFIISMGWFRQAPGKEHEFVTGINWSGGSTTYAD |
| | | SVKGRFTINADNSKNTAYLQMNSLKPEDTAVYYCAASAIGSGALRRFEYDWGQGTLVTV |
| | | SS |
| 5A-63 | 2593 | EVQLVESGGGLVQPGGSLRLSCAASGFSLDYYDMGWFRQAPGKEREFVAALGWSGGSTD |
| | | YADSVKGRFTISADNSKNTAYLQMNSLKPEDTAVYYCAAGNGGRYGIVERWGQGTLVT |
| | | VSS |
| 5A-64 | 2594 | EVQLVESGGGLVQPGGSLRLSCAASGTSISNRVMGWFRQAPGKERELVARIYTGGDTLYA |
| | | DSVKGRFTISADNSKNTAYLQMNSLKPEDTAVYYCAARKIYRSLSYYGDYDWGQGTLVT |
| | | VSS |
| 5A-65 | 2595 | EVQLVESGGGLVQPGGSLRLSCAASGNIDRLYAMGWFRQAPGKEREGVAAIDSDGSTDY |
| | | ADSVKGRFTISADNSKNTAYLQMNSLKPEDTAVYYCAALIDYGLGFPIEWGQGTLVTVSS |
| 5A-66 | 2596 | EVQLVESGGGLVQPGGSLRLSCAASGNTFTINVMGWFRQAPGKEREFVAAINWNGGTTL |
| | | YADSVKGRFTISADNSKNTAYLQMNSLKPEDTAVYYCAAFDGYSGIDWGQGTLVTVSS |
| 5A-67 | 2597 | EVQLVESGGGLVQPGGSLRLSCAASGFNVNDYAMGWFRQAPGKEREFVAGITSSVGVTN |
| | | YADSVKGRFTISADNSKNTAYLQMNSLKPEDTAVYYCAADIFFVNWGRGTLVTVSS |
| 5A-68 | 2598 | EVQLVESGGGLVQPGGSLRLSCAASGFTFDHYTMGWFRQAPGKEREFVAAISGSENVTSY |
| | | ADSVKGRFTISADNSKNTAYLQMNSLKPEDTAVYYCAAEPYIPVRTMRHMTFLTWGQGT |
| | | LVTVSS |
| 6A-1 | 2599 | EVQLVESGGGLVQPGGSLRLSCAASGRTFGNYNMGWFRQAPGKEREFVATINSLGGTSY |
| | | ADSVKGRFTISADNSKNTAYLQMNSLKPEDTAVYYCARVDYYMDVWGQGTLVTVSS |
| 6A-2 | 2600 | EVQLVESGGGLVQPGGSLRLSCAASGFTMSSSWMGWFRQAPGKEREFVTVISGVGTSYA |
| | | DSVKGRFTISADNSKNTAYLQMNSLKPEDTAVYYCARGPDSSGYGFDYWGQGTLVTVSS |
| 6A-3 | 2601 | EVQLVESGGGLVQPGGSLRLSCAASGFTFSPSWMGWFRQAPGKEREFVATINEYGGRNY |
| | | ADSVKGRFTISADNSKNTAYLQMNSLKPEDTA VYYCARVDRDFDYWGQGTLVTVSS |
| 6A-4 | 2602 | EVQLVESGGGLVQPGGSLRLSCAASGFTRDYYTMGWFRQAPGKEREFVAAISRSGSLTSY |
| | | ADSVKGRFTISADNSKNTAYLQMNSLKPEDTAVYYCANLAYYDSSGYYDYWGQGTLVT |
| | | VSS |
| 6A-5 | 2603 | EVQLVESGGGLVQPGGSLRLSCAASGRTFTMGWFRQAPGKEREFVASTNSAGSTNYADS |
| | | VNGRFTISADNSKNTAYLQMNSLKPEDTAVYYCTTVDQYFDYWGQGTLVTVSS |
| 6A-6 | 2604 | EVQLVESGGGLVQPGGSLRLSCAASGTTLDYYAMGWFRQAPGKERELVAAISWSGGSTA |
| | | YADSVKGRFTISADNSKNTAYLQMNSLKPEDTAVYYCAREDYYDSSGYSWGQGTLVTVS |
| | | S |
| 6A-7 | 2605 | EVQLVESGGGLVQPGGSLRLSCAASGFTFSSYWMGWFRQAPGKEREFVATINWSGVTAY |
| | | ADSVKGRFTISADNSKNTAYLQMNSLKPEDTAVYYCARADDYFDYWGQGTLVTVSS |
| 6A-8 | 2606 | EVQLVESGGGLVQPGGSLRLSCAASGFTLSGIWMGWFLQAPGKEHEFVAIITTGGRTTYA |
| | | DSXKGRFTSSSDNSKNTAYLQMNLLKPEDTAEYYCAGYSTFGSSSAYYYYSMDVGWGQ |
| | | GTLVTVSS |
| 6A-9 | 2607 | EVQLVESGGGLVQPGGSLRLSCAASGFTFDYYAMGWFRQAPGKEREFVSAIDSEGRTSYA |
| | | DSVKGRFTISADNSKNTAYLQMNSLKPEDTAVYYCARWGPFDIWGQGTLVTVSS |
| 6A-10 | 2608 | EVQLVESGGGLVQPGGSLRLSCAASGSIASIHAMGWFRQAPGKEREFVAAISRSGGFGSYA |
| | | DSVKGRFTISADNSKNTAYLQMNSLKPEDTAVYYCARDDKYYDSSGYPAYFQHWGQGT |
| | | LVTVSS |
| 6A-11 | 2609 | EVQLVESGGGLVQPGGSLRLSCAASGLAFNAYAMGWFRQAPGKEREEVATIGWSGANTY |
| | | YADSVKGRFTISADNSKNTAYLQMNSLKPEDTAVYYCASDPPGWGQGTLVTVSS |
| 6A-12 | 2610 | EVQLVESGGGLVQPGGSLRLSCAASGSTYTTYSMGWFRQAPGKEREFVAAISGSENVTSY |
| | | ADSVKGRFTISADNSKNTAYLQMNSLKPEDTAVYYCARVDDYMDVWGQGTLVTVSS |
| 6A-13 | 2611 | EVQLVESGGGLVQPGGSLRLSCAASGLTFNDYAMGWFRQAPGKEREFVAHIPRSTYSPYY |
| | | ADSVKGRFTISADNSKNTAYLQMNSLKPEDTAVYYCAFLVGPQGVDHGAFDVWGQGTL |
| | | VTVSS |
| 6A-14 | 2612 | EVQLVESGGGLVQPGGSLRLSCAASGITFRFKAMGWFRQAPGKEREFVAAVSWDGRNTY |
| | | YADSVKGRFTISADNSKNTAYLQMNSLKPEDTAVYYCASDYYYMDVWGQGTLVTVSS |
| 6A-15 | 2613 | EVQLVESGGGLVQPGGSLRLSCAASGSTVLINAMGWFRQAPGKEREFVAAVRWSDDYTY |
| | | YADSVKGRFTISADNSKNTAYLQMNSLKPEDTAVYYCAKEGRAGSLDYWGQGTLVTVSS |
| 6A-16 | 2614 | EVQLVESGGGLVQPGGSLRLSCAASGFTFDDAAMGWFRQAPGKEREFVAHISWSGGSTY |
| | | YADSVKGRFTISADNSKNTAYLQMNSLKPEDTAVYYCATFGATVTATNDAFDIWGQGTL |
| | | VTVSS |
| 6A-17 | 2615 | EVQLVESGGGLVQPGGSLRLSCAASGNTGSTGYMGWFRQAPGKEREMVAGVINDGSTVY |
| | | ADSVKGRFTISADNSKNTAYLQMNSLKPEDTAVYYCARLATSHQDGTGYLFDYWGQGTL |
| | | VTVSS |
| 6A-18 | 2616 | EVQLVESGGGLVQPGGSLRLSCAASGLTFRNYAMGWFRQAPGKEREFIAGMMWSGGTTT |
| | | YADSVKGRFTISADNSKNTAYLQMNSLKPEDTAVYYCAREGYYYDSSGYLNYFDYWGQ |
| | | GTLVTVSS |
| 6A-19 | 2617 | EVQLVESGGGLVQPGGSLRLSCAASGSILSIAVMGWFRQAPGKEREFVAAISPSAVTTYYA |
| | | DSVKGRFTISADNSKNTAYLQMNSLKPEDTAVYYCAIGYYDSSGYFDYWGQGTLVTVSS |
| 6A-20 | 2618 | EVQLVESGGGLVQPGGSLRLSCAASGSTLPYHAMGWFRQAPGKEREFVAAITWNGASTS |
| | | YADSVKGRFTISADNSKNTAYLQMNSLKPEDTAVYYCARDRYYDTSASYFESETWGQGT |
| | | LVTVSS |
| 6A-21 | 2619 | EVQLVESGGGLVQPGGSLRLSCAASGTLFKINAMGWFRQAPGKEREFVAAITSSGSNIDYT |
| | | YYADSVKGRFTISADNSKNTAYLQMNSLKPEDTAVYYCARSNTGWYSFDYWGQGTLVT |
| | | VSS |
| 6A-22 | 2620 | EVQLVESGGGLVQPGGSLRLSCAASGRTFSEVVMGWFRQAPGKEREFVATIHSSGSTSYA |
| | | DSVKGRFTISADNSKNTAYLQMNSLKPEDTAVYYCVRVTSDYSMDSWGQGTLVTVSS |
| 6A-23 | 2621 | EVQLVESGGGLVQPGGSLRLSCAASGSIFSMNTMGWFRQAPGKEREFVALINRSGGGINY |
| | | ADSVKGRFTISADNSKNTAYLQMNSLKPEDTAVYYCVRLSSGYYDFDYWGQGTLVTVSS |
| 6A-24 | 2622 | EVQLVESGGGLVQPGGSLRLSCAASGFTLDYYAMGWFRQAPGKEREFVAAINWSGDNTH |
| | | YADSVKGRFTISADNSKNTAYLQMNSLKPEDTAVYYCARAPFYCTTTKCQDNYYYMDV |
| | | WGQGTLVTVSS |
| 6A-25 | 2623 | EVQLVESGGGLVQPGGSLRLSCAASGLTFGTYTMGWFRQAPGKEREFVAAISRFGSTYYA |
| | | DSVKGRFTISADNSKNTAYLQMNSLKPEDTAVYYCARGGDYDFWSVDYMDVWGQGTL |
| | | VTVSS |
| 6A-26 | 2624 | EVQLVESGGGLVQPGGSLRLSCAASGDTFSTSWMGWFRQAPGKEREFVATINTGGGTNY |
| | | ADSVKGRFTISADNSKNTAYLQMNSLKPEDTAVYYCARVTTSFDYWGQGTLVTVSS |
| 6A-27 | 2625 | EVQLVESGGGLVQPGGSLRLSCAASGITFRFKAMGWFRQAPGKEREFVASISRSGTTYYA |
| | | DSVKGRFTISADNSKNTAYLQMNSLKPEDTAVYYCATDYSAFDMWGQGTLVTVSS |
| 6A-28 | 2626 | EVQLVESGGGLVQPGGSLRLSCAASGDTYGSYWMGWFRQAPGKEREFVATITSDDRTNY |
| | | ADSVKGRFTISADNSKNTAYLQMNSLKPEDTAVYYCARVTSSLSGMDVWGQGTLVTVSS |
| 6A-29 | 2627 | EVQLVESGGGLVQPGGSLRLSCAASGYTLKNYYAMGWFRQAPGKERXLVAAIIWTGEST |
| | | LDADSVKGRFTISADNSKNTAYLQMNSLKPEDTAVYYCAREGYYDSSGYYWGQGTLVT |
| | | VSS |
| 6A-30 | 2628 | EVQLVESGGGLVQPGGSLRLSCAASGFAFGDSWMGWFRQAPGKEREFVATINWSGVTAY |
| | | ADSVKGRFTISADNSKNTAYLQMNSLKPEDTAVYYCARADGYFDYWGQGTLVTVSS |
| 6A-31 | 2629 | EVQLVESGGGLVQPGGSLRLSCAASGDTFSANRMGWFRQAPGKEREFVASITWSSANTY |
| | | YADSVKGRFTISADNSKNTAYLQMNSLKPEDTAVYYCATFNWNDEGFDFWGQGTLVTVS |
| | | S |
| 6A-32 | 2630 | EVQLVESGGGLVQPGGSLRLSCAASGFTLDYYDMGWFRQAPGKEREFVALISWSGGSTY |
| | | YADSVKGRFTISADNSKNTAYLQMNSLKPEDTAVYYCATDFYGWGTRERDAFDIWGQGT |
| | | LVTVSS |
| 6A-33 | 2631 | EVQLVESGGGLVQPGGSLRLSCAASGTFQRINHMGWFRQAPGKEREFVATINTGGQPNYA |
| | | DSVKGRFTISADNSKNTAYLQMNSLKPEDTAVYYCASLIAAQDYYFDYWGQGTLVTVSS |
| 6A-34 | 2632 | EVQLVESGGGLVQPGGSLRLSCAASGSAFRSNAMGWFRQAPGKEREFVAHISWSSKSTYY |
| | | ADSVKGRFTISADNSKNTAYLQMNSLKPEDTAVYYCATYCSSTSCFDYWGQGTLVTVSS |
| 6A-35 | 2633 | EVQLVESGGGLVQPGGSLRLSCAASGFTLAYYAMGWFRQAPGKEREFVAAISMSGDDTIY |
| | | ADSVKGRFTISADNSKNTAYLQMNSLKPEDTAVYYCARELGYSSTVWPWGQGTLVTVSS |
| 6A-36 | 2634 | EVQLVESGGGLVQPGGSLRLSCAASGFDFSVSWMGWFRQAPGKEREFVTAITWSGDSTN |
| | | YADSVKGRFTISADNSKNTAYLQMNSLKPEDTAVYYCASLLHTGPSGGNYFDYWGQGTL |
| | | VTVSS |
| 6A-37 | 2635 | EVQLVESGGGLVQPGGSLRLSCAASGHTFSTSWMGWFRQAPGKEREFVATINSLGGTNY |
| | | ADSVKGRFTISADNSKNTAYLQMNSLKPEDTAVYYCARVSSGDYGMDVWGQGTLVTVS |
| | | S |
| 6A-38 | 2636 | EVQLVESGGGLVQPGGSLRLSCAASGNTFSGGFMGWFRQAPGKEREFVA VISSLSSKSYA |
| | | DSVKGRFTISADNSKNTAYLQMNSLKPEDTAVYYCAKVDSGYDYWGQGTLVTVSS |
| 6A-39 | 2637 | EVQLVESGGGLVQPGGSLRLSCAASGFTFSPSWMGWFRQAPGKEREFVAAISWSGGSTAY |
| | | ADSVKGRFTISADNSKNTAYLQMNSLKPEDTAVYYCHGLGEGDPYGDYEGYFDLWGQG |
| | | TLVTVSS |
| 6A-40 | 2638 | EVQLVESGGGLVQPGGSLRLSCAASGFTFSDYWMGWFRQAPGKERELVARVWWNGGSA |
| | | YYADSVKGRFTISADNSKNTAYLQMNSLKPEDTAVYYCAREVLRQQVVLDYWGQGTLV |
| | | TVSS |
| 6A-41 | 2639 | EVQLVESGGGLVQPGGSLRLSCAASGFTFSTSWMGWFRQAPGKEREFVASINEYGGRNY |
| | | ADSVKGRFTISADNSKNTAYLQMNSLKPEDTAVYYCAGLHYYYDSSGYNPTEYYGMDV |
| | | WGQGTLVTVSS |
| 6A-42 | 2640 | EVQLVESGGGLVQPGGSLRLSCAASGDTYGSYWMGWFRQAPGKEREFVAVITSGGSTNY |
| | | ADSVKGRFTISADNSKNTAYLQMNSLKPEDTAVYYCTHVQNSYYYAMDVWGQGTLVTV |
| | | SS |
| 6A-43 | 2641 | EVQLVESGGGLVQPGGSLRLSCAASGRTFSSYAMMGWFRQAPGKEREFVASVNWDASQI |
| | | NYADSVKGRFTISADNSKNTAYLQMNSLKPEDTAVYYCTTLGAVYFDSSGYHDYFDYWG |
| | | QGTLVTVSS |
| 6A-44 | 2642 | EVQLVESGGGLVQPGGSLRLSCAASGGTFGVYHMGWFRQAPGKEREFIGRITWTDGSTY |
| | | YADSVKGRFTISADNSKNTAYLQMNSLKPEDTAVYYCFGLLEVYDMTFDYWGQGTLVT |
| | | VSS |
| 6A-45 | 2643 | EVQLVESGGGLVQPGGSLRLSCAASGNMFSINAMGWFRQAPGKEREFVTLISWSSGRTSY |
| | | ADSVKGRFTISADNSKNTAYLQMNSLKPEDTAVYYCASLGYCSGGSCFDYWGQGTLVTV |
| | | SS |
| 6A-46 | 2644 | EVQLVESGGGLVQPGGSLRLSCAASGLTFSAMGWFRQAPGKEREFVALIRRDGSTIYADS |
| | | VKGRFTISADNSKNTAYLQMNSLKPEDTAVYYCAALGILFGYDAFDIWGQGTLVTVSS |
| 6A-47 | 2645 | EVQLVESGGGLVQPGGSLRLSCAASGRTFSMHAMGWFRQAPGKERELVASITYGGNINY |
| | | ADSVKGRFTISADNSKNTAYLQMNSLKPEDTAVYYCAKEGYYDSTGYRTYFQQWGQGT |
| | | LVTVSS |
| 6A-48 | 2646 | EVQLVESGGGLVQPGGSLRLSCAASGFTVSNYAMGWFRQAPGKEREFVASVNWSGGTTS |
| | | YADSVKGRFTISADNSKNTAYLQMNSLKPEDTAVYYCATTGTVTLGYWGQGTLVTVSS |
| 6A-49 | 2647 | EVQLVESGGGLVQPGGSLRLSCAASGSTVLINAMGWFRQAPGKEREFVAAISWSPGRTDY |
| | | ADSVKGRFTISADNSKNTAYLQMNSLKPEDTAVYYCARDCSGGSCYSGDYWGQGTLVTV |
| | | SS |
| 6A-50 | 2648 | EVQLVESGGGLVQPGGSLRLSCAASGFSFDRWAMGWFRQAPGKEREWVASLATGGNTN |
| | | YADSVKGRFTISADNSKNTAYLQMNSLKPEDTAVYYCARVTNYDAFDIWGQGTLVTVSS |
| 6A-51 | 2649 | EVQLVESGGGLVQPGGSLRLSCAASGYTYSSYVMGWFRQAPGKEREFVAAISRFGSTYYA |
| | | DSVKGRFTISADNSKNTAYLQMNSLKPEDTAVYYCARDSGEHFWDSGYIDHWGQGTLVT |
| | | VSS |
| 6A-52 | 2650 | EVQLVESGGGLVQPGGSLRLSCAASGDTYGSYWMGWFRQAPGKEREVVAAITSGGSTVY |
| | | ADSVKGRFTISADNSKNTAYLQMNSLKPEDTAVYYCARVDSRFDYWGQGTLVTVSS |
| 6A-53 | 2651 | EVQLVESGGGLVQPGGSLRLSCAASGISINTNVMGWFRQAPGKEREFVAAISTGSVTIYAD |
| | | SVKGRFTISADNSKNTAYLQMNSLKPEDTAVYYCARVDDFGYFDLWGQGTLVTVSS |
| 6A-54 | 2652 | EVQLVESGGGLVQPGGSLRLSCAASGFEFENHWMGWFRQAPGKEREYVAHITAGGLSNY |
| | | ADSVKGRFTISADNSKNTAYLQMNSLKPEDTAVYYCGRHWGIYDSSGFSSFDYWGQGTL |
| | | VTVSS |
| 6A-55 | 2653 | EVQLVESGGGLVQPGGSLRLSCAASGFTMSSSWMGWFRQAPGKEREFVARITSGGSTGY |
| | | ADSVKGRFTISADNSKNTAYLQMNSLKPEDTAVYYCASVDGYFDYWGQGTLVTVSS |
| 6A-56 | 2654 | EVQLVESGGGLVQPGGSLRLSCAASGNIFRSNMGWFRQAPGKEREFVAGITWNGDTTYY |
| | | ADSVKGRFTISADNSKNTAYLQMNSLKPEDTAVYYCARALGVTYQFDYWGQGTLVTVSS |
| 6A-57 | 2655 | EVQLVESGGGLVQPGGSLRLSCAASGLTFDDHSMGWFRQAPGKEREFVAAVPLSGNTYY |
| | | ADSVKGRFTISADNSKNTAYLQMNSLKPEDTAVYYCASFSGGPADFDYWGQGTLVTVSS |
| 6A-58 | 2656 | EVQLVESGGGLVQPGGSLRLSCAASGRAVSTYAMGWFRQAPGKEREFVAAISGSENVTSY |
| | | ADSVKGRFTISADNSKNTAYLQMNSLKPEDTAVYYCLSVTGDTEDYGVFDTWGQGTLVT |
| | | VSS |
| 6A-59 | 2657 | EVQLVESGGGLVQPGGSLRLSCAASGISGSVFSRTPMGWFRQAPGKEREWVSSIYSDGSNT |
| | | YYADSVKGRFTISADNSKNTAYLQMNSLKPEDTAVYYCAHWSWELGDWFDPWGQGTLV |
| | | TVSS |
| 6A-60 | 2658 | EVQLVESGGGLVQPGGSLRLSCAASGDTYGSYWMGWFRQAPGKEREFVATISQSGAATA |
| | | YADSVKGRFTISADNSKNTAYLQMNSLKPEDTAVYYCAGLLRYSGTYYDAFDVWGQGT |
| | | LVTVSS |
| 6A-61 | 2659 | EVQLVESGGGLVQPGGSLRLSCAASGDTYGSYWMGWFRQAPGKEREFVAAINWSGGST |
| | | NYADSVKGRFTITADNNKNTAYLQMNSLKPEDTAVYYCAGLGWNYMDYWGQGTLVTV |
| | | SS |
| 6A-62 | 2660 | EVQLVESGGGLVQPGGSLRLSCAASGSTFSGNWMGWFRQAPGKEREFVAVISWTGGSTY |
| | | YADSVKGRFTISADNSKNTAYLQMNSLKPEDTAVYYCATHNSLSGFDYWGQGTLVTVSS |
| 6A-63 | 2661 | EVQLVESGGGLVQPGGSLRLSCAASGQTFNMGWFRQAPGKEREFVAAIGSGGSTSYADSV |
| | | KGRFTISADNSKNTAYLQMNSLKPEDTAVYYCWRLGNDYFDYWGQGTLVTVSS |
| 6A-64 | 2662 | EVQLVESGGGLVQPGGSLRLSCAASGIPSIHAMGWFRQAPGKERELVAAINWSHGVTYYA |
| | | DSVKGRFTISADNSKNTAYLQMNSLKPEDTAVYYCGGGYGYHFDYWGQGTLVTVSS |
| 6A-65 | 2663 | EVQLVESGGGLVQPGGSLRLSCAASGLPFSTLHMGWFRQAPGKEREFVASLSIFGATGYA |
| | | DSVKGRFTISADNSKNTAYLQMNSLKPEDTAVYYCWMYYYDSSGYYGNYYYGMDVWG |
| | | QGTLVTVSS |
| 6A-66 | 2664 | EVQLVESGGGLVQPGGSLRLSCAASGLTFSLFAMGWFRQAPGKERELVAAISSGGSTDYA |
| | | DSVKGRFTISADNSKNTAYLQMNSLKPEDTAVYYCARGNTKYYYDSSGYSSAFDYWGQG |
| | | TLVTVSS |
| 6A-67 | 2665 | EVQLVESGGGLVQPGGSLRLSCAASGSFSNYAMGWFRQAPGKEREFVAAISSSGALTSYA |
| | | DSVKGRFTISADNSKNTAYLQMNSLKPEDTAVYYCWIVGPGPLDGMDVWGQGTLVTVSS |
| 6A-68 | 2666 | EVQLVESGGGLVQPGGSLRLSCAASGFTLSDRAMGWFRQAPGKEREYVAHITAGGLSNY |
| | | ADSVKGRFTISADNSKNTAYLQMNSLKPEDTAVYYCVHLASQTGAGYFDLWGQGTLVTV |
| | | SS |
| 6A-69 | 2667 | EVQLVESGGGLVQPGGSLRLSCAASGGTFSSVGMGWFRQAPGKEREFVAGISRSGGTYYA |
| | | DSVKGRFTISADNSKNTAYLQMNSLKPEDTAVYYCARYDFWSGYPYWGQGTLVTVSS |
| 6A-70 | 2668 | EVQLVESGGGLVQPGGSLRLSCAASGFNLDDYADMGWFRQAPGKEREFVAAIGWGGGST |
| | | RYADSVKGRFTISADNSKNTAYLQMNSLKPEDTAVYYCAREILWFGEFGEPNVWGQGTL |
| | | VTVSS |
| 6A-71 | 2669 | EVQLVESGGGLVQPGGSLRLSCAASGITFSNDAMGWFRQAPGKEREFVAIITSSDTNDTTN |
| | | YADSVKGRFTISADNSKNTAYLQMNSLKPEDTAVYYCARLHYYDSSGYFDYWGQGTLVT |
| | | VSS |
| 6A-72 | 2670 | EVQLVESGGGLVQPGGSLRLSCAASGSTLSINAMGWFRQAPGKEREFVAAIDWSGGSTAY |
| | | ADSVKGRFTISADNSKNTAYLQMNSLKPEDTAVYYCARDSSATRTGPDYWGQGTLVTVS |
| | | S |
| 6A-73 | 2671 | EVQLVESGGGLVQPGGSLRLSCAASGHTFSGYAMGWFRQAPGKEREFVAVITREGSTYY |
| | | ADSVKGRFTISADNSKNTAYLQMNSLKPEDTAVYYCARLGGEGFDYWGQGTLVTVSS |
| 6A-74 | 2672 | EVQLVESGGGLVQPGGSLRLSCAASGFAFGDSWMGWFRQAPGKERELVAAITSGGSTDY |
| | | ADSVKGRFTISADNSKNTAYLQMNSLKPEDTAVYYCARGLLWFGELFGYWGQGTLVTVS |
| | | S |
| 6A-75 | 2673 | EVQLVESGGGLVQPGGSLRLSCAASGGTFSTYWMGWFRQAPGKEREFVAAISRSGGNTY |
| | | YADSVKGRFTISADNSKNTAYLQMNSLKPEDTAVYYCVRHSGTDGDSSFDYWGQGTLVT |
| | | VSS |
| 6A-76 | 2674 | EVQLVESGGGLVQPGGSLRLSCAASGLAFDFDGMGWFRQAPGKEREGVAAINSGGSTYY |
| | | ADSVKGRFTISADNSKNTAYLQMNSLKPEDTAVYYCARFFRAHDYWGQGTLVTVSS |
| 6A-77 | 2675 | EVQLVESGGGLVQPGGSLRLSCAASGFTFDRSWMGWFRQAPGKEREFVAAVTEGGTTSY |
| | | ADSVKGRFTISADNSKNTAYLQMNSLKPEDTAVYYCARADYDFDYWGQGTLVTVSS |
| 6A-78 | 2676 | EVQLVESGGGLVQPGGSLRLSCAASGRTYDAMGWFRQAPGKEREFVASVTSGGYTHYAD |
| | | SVKGRFTISADNSKNTAYLQMNSLKPEDTAVYYCAKFGRKIVGATELDYWGQGTLVTVS |
| | | S |
| 6A-79 | 2677 | EVQLVESGGGLVQPGGSLRLSCAASGSISSIDYMGWFRQAPGKEREGVSWISSSDGSTYYA |
| | | DSVKGRFTISADNSKNTAYLQMNSLKPEDTA VYYCARSPSFSQIYYYYYMDVWGQGTLV |
| | | TVSS |
| 6A-80 | 2678 | EVQLVESGGGLVQPGGSLRLSCAASGGTFSFYNMGWFRQAPGKEREFVAFISGNGGTSYA |
| | | DSVKGRFTISADNSKNTAYLQMNSLKPEDTAVYYCAVVAMRMVTTEGPDVLDVWGQGT |
| | | LVTVSS |
| 6A-81 | 2679 | EVQLVESGGGLVQPGGSLRLSCAASGFIGNYHAMGWFRQAPGKEREFVAAVTWSGGTTN |
| | | YADSVKGRFTISADNSKNTAYLQMNSLKPEDTAVYYCAREGYYYDSSGYPYYFDYWGQ |
| | | GTLVTVSS |
| 6A-82 | 2680 | EVQLVESGGGLVQPGGSLRLSCAASGSSLDAYGMGWFRQAPGKEREFVAAISWGGGSIY |
| | | YADSVKGRFTISADNSKNTAYLQMNSLKPEDTAVYYCARLSQGMVALDYWGQGTLVTV |
| | | SS |
| 6A-83 | 2681 | EVQLVESGGGLVQPGGSLRLSCAASGSIASIHAMGWFRQAPGKEREFVAAITWSGAITSYA |
| | | DSVKGRFTISADNSKNTAYLQMNSLKPEDTAVYYCAKDGGYGELHYGMEVWGQGTLVT |
| | | VSS |
| 6A-84 | 2682 | EVQLVESGGGLVQPGGSLRLSCAASGFTPDDYAMGWFRQAPGKEREFVAAINSGGSYTY |
| | | YADSVKGRFTISADNSKNTAYLQMNSLKPEDTAVYYCARDRGPWGQGTLVTVSS |
| 6A-85 | 2683 | EVQLVESGGGLVQPGGSLRLSCAASGGTFSVFAMGWFRQAPGKEREFVSAINWSGGSLLY |
| | | ADSVKGRFTISADNSKNTAYLQMNSLKPEDTAVYYCALFGDFDYWGQGTLVTVSS |
| 6A-86 | 2684 | EVQLVESGGGLVQPGGSLRLSCAASGPISGINRMGWFRQAPGKEREFVAVITSNGRPSYAD |
| | | SVKGRFTISADNSKNTAYLQMNSLKPEDTAVYYCVRLSSGYFDFDYWGQGTLVTVSS |
| 6A-87 | 2685 | EVQLVESGGGLVQPGGSLRLSCAASGTSIMVGAMGWFRQAPGKEREFVAIIRGDGRTSYA |
| | | DSVKGRFTISADNSKNTAYLQMNSLKPEDTAVYYCARFAGWDAFDIWGQGTLVTVSS |
| 6A-88 | 2686 | EVQLVESGGGLVQPGGSLRLSCAASGRTFSTHWMGWFRQAPGKEREFVAVINWSGGSIY |
| | | YADSVKGRFTISADNSKNTAYLQMNSLKPEDTAVYYCARLSSDGYNYFDFWGQGTLVTV |
| | | SS |
| 6A-89 | 2687 | EVQLVESGGGLVQPGGSLRLSCAASGTIFASAMGWFRQAPGKEHQFVAVVNWNGSSTVY |
| | | ADNVKGRFTIIADNSKNTAYLQMNSLKPEDTAVYYCTTVDQYFNYWGQGTLVTVSS |
| 6A-90 | 2688 | EVQLVESGGGLVQPGGSLRLSCAASGFPFSIWPMGWFRQAPGKEREFVAAVRWSSTYYA |
| | | DSVKGRFTISADNSKNTAYLQMNSLKPEDTAVYYCATGECDGGSCSLAYWGQGTLVTVS |
| | | S |
| 6A-91 | 2689 | EVQLVESGGGLVQPGGSLRLSCAASGRTFGNYAMGWFRQAPGKEREFVASISSSGVSKHY |
| | | ADSVKGRFTISADNSKNTAYLQMNSLKPEDTAVYYCVRFGSSWARDLDQWGQGTLVTVS |
| | | S |
| 6A-92 | 2690 | EVQLVESGGGLVQPGGSLRLSCAASGFLFDSYASMGWFRQAPGKEREFVATlWRRGNTY |
| | | YANYADSVKGRFTISADNSKNTAYLQMNSLKPEDTAVYYCTETGTAAWGQGTLVTVSS |
| 6A-93 | 2691 | EVQLVESGGGLVQPGGSLRLSCAASGLPFSTKSMGWFRQAPGKEREFVAAISMSGLTSYA |
| | | DSVKGRFTISADNSKNTAYLQMNSLKPEDTAVYYCLKVLGGDYEADNWFDYWGQGTLV |
| | | TVSS |
| 6A-94 | 2692 | EVQLVESGGGLVQPGGSLRLSCAASGNIFRIETMGWFRQAPGKEREFVAGIIRSGGETLYA |
| | | DSVKGRFTISADNSKNTAYLQMNSLKPEDTAVYYCARSLYYDRSGSYYFDYWGQGTLVT |
| | | VSS |
| 6A-95 | 2693 | EVQLVESGGGLVQPGGSLRLSCAASGIPSSIRAMGWFRQAPGKEREFVAVIRWTGGSTYY |
| | | ADSVKGRFTISADNSKNTAYLQMNSLKPEDTAVYYCARDIGYYDSSGYYNDGGFDYWG |
| | | QGTLVTVSS |
| 6A-96 | 2694 | EVQLVESGGGLVQPGGSLRLSCAASGFTLSGNWMGWFRQAPGKEREFVAIITSGGRTNYA |
| | | DSVKGRFTISADNSKNTAYLQMNSLKPEDTAVYYCAGHATFGGSSSSYYYGMDVWGQG |
| | | TLVTVSS |
| 6A-97 | 2695 | EVQLVESGGGLVQPGGSLRLSCAASGFTFSSLAMGWFRQAPGKEREFVAAITWSGDITNY |
| | | ADSVKGRFTITADNSKNTAYLQMNSLKPEDTAVYYCLRLSSSGFDHWGQGTLVTVSS |
| 6A-98 | 2696 | EVQLVESGGGLVQPGGSLRLSCAASGTFGHYAMGWFRQAPGKEREFVAAINWSSRSTVY |
| | | ADSVKGRFTITADNSKNTAYLQMNSLKPEDTAVYYCAKSDGLMGELRSASAFDIWGQGT |
| | | LVTVSS |
| 6A-99 | 2697 | EVQLVESGGGLVQPGGSLRLSCAASGIPFRSRTMGWFRQAPGKEREFVAGISRSGASTAYA |
| | | DSVKGRFTISADNSKNTAYLQMNSLKPEDTAVYYCTHANDYGDYWGQGTLVTVSS |
| 6A-100 | 2698 | EVQLVESGGGLVQPGGSLRLSCAASGGTFSTSWMGWFRQAPGKEREYVAHITAGGLSNY |
| | | ADSVKGRFTISADNSKNTAYLQMNSLKPEDTAVYYCARLLVREDWYFDLWGQGTLVTVS |
| | | S |
| 6A-101 | 2699 | EVQLVESGGGLVQPGGSLRLSCAASGGTFSLFAMGWFRQAPGKEREFVAAISWTGDSTYY |
| | | KYYADSVKGRFTISADNSKNTAYLQMNSLKPEDTAVYYCAYNNSSGEYWGQGTLVTVSS |
| 6A-102 | 2700 | EVQLVESGGGLVQPGGSLRLSCAASGSSFSAYAMGWFRQAPGKEREFVSAIDSEGTTTYA |
| | | DSVKGRFTISADNSKNTAYLQMNSLKPEDTAVYYCAGDYNFWSGFDHWGQGTLVTVSS |
| 6A-103 | 2701 | EVQLVESGGGLVQPGGSLRLSCAASGRTSSPIAMGWFRQAPGKEREPVAVRWSDDYTYY |
| | | ADSVKGRFTISADNSKNTAYLQMNSLKPEDTAVYYCAKKLGGYYAFDIWGQGTLVTVSS |
| 6A-104 | 2702 | DSVKGRFTISADNSKNTAYLQMNSLKPEDTAVYYCARDSRYMDVWGQGTLVTVSS |
| 6A-105 | 2703 | EVQLVESGGGLVQPGGSLRLSCAASGPTFSSMGWFRQAPGKEREFVAAISWDGGATAYA |
| | | DSVKGRFTISADNSKNTAYLQMNSLKPEDTAVYYCAIEIVVGGIYWGQGTLVTVSS |
| 6A-106 | 2704 | EVQLVESGGGLVQPGGSLRLSCAASGIPSTLRAMGWFRQAPGKEREFVAATSWSGGSKY |
| | | YADSVKGRFTISADNSKNTAYLQMNSLKPEDTAVYYCATDLYYMDVWGQGTLVTVSS |
| 6A-107 | 2705 | EVQLVESGGGLVQPGGSLRLSCAASGGVGFSVTNMGWFRQAPGKEREFVAVISSSSSTNY |
| | | ADSVKGRFTISADNSKNTAYLQMNSLKPEDTAVYYCTTFNWNDEGFDYWGQGTLVTVSS |
| 6A-108 | 2706 | EVQLVESGGGLVQPGGSLRLSCAASGGTFGSYGMGWFRQAPGKEREFVAAIRWSGGITY |
| | | YADSVKGRFTISADNSKNTAYLQMNSLKPEDTAVYYCARERYWNPLPYYYYGMDVWGQ |
| | | GTLVTVSS |
| 6A-109 | 2707 | EVQLVESGGGLVQPGGSLRLSCAASGGTFSTYAMGWFRQVPGKEREFVASIDWSGLTSYA |
| | | DSVKGRFTISADNSKNTAYLQMNSLKPEDTAVYYCARGPFYMYCSGTKCYSTNWFDPWG |
| | | QGTLVTVSS |
| 6A-110 | 2708 | EVQLVESGGGLVQPGGSLRLSCAASGPIYAVNRMGWFRQAPGKEREFVAGIWRSGGHRD |
| | | YADSVKGRFTISADNSKNTAYLQMNSLKPEDTAVYYCARGEIDILTGYWYDYWGQGTLV |
| | | TVSS |
| 6A-111 | 2709 | EVQLVESGGGLVQPGGSLRLSCAASGFTFSNYWMGWFRQAPGKEREFVGGISRSGVSTSY |
| | | ADSVKGRFTISADNSKNTAYLQMNSLKPEDTAVYYCTTLLYYYDSSGYSFDAFDIWGQGT |
| | | LVTVSS |
| 6A-112 | 2710 | EVQLVESGGGLVQPGGSLRLSCAASGGTFSAYHMGWFRQAPGKERELVTIIDNGGPTSYA |
| | | DSVKGRFTISADNSKNTAYLQMNSLKPEDTAVYYCTALLYYFDNSGYNFDPFDIWGQGTL |
| | | VTGSS |
| 2A-H1 | 2711 | EVQLLESGGGLVQPGGSLRLSCAASGFTFSNYATDWVRQAPGKGLEWVSIISGSGGATYY |
| | | ADSVKGRFTISRDNSKNTLYLQMNSLRAEDTAVYYCAKGGYCSSDTCWWEYWLDPWGQ |
| | | GTLVTVSS |
| 2A-H2 | 2712 | EVQLLESGGGLVQPGGSLRLSCAASGFTFSAFAMGWVRQAPGKGLEWVSAITASGDITYY |
| | | ADSVKGRFTISRDNSKNTLYLQMNSLRAEDTAVYYCARQSDGLPSPWHFDLGGQGTLVT |
| | | VSS |
| 2A-H3 | 2713 | EVQLLESGGGLVQPGGSLRLSCAASGFTFSDFAMAWVRQAPGKGLEWVSAISGSGDITYY |
| | | ADSVKGRFTISRDNSKNTLYLQMNSLRAEDTAVYYCAREADGLHSPWHFDLWGQGTLVT |
| | | VSS |
| 2A-H4 | 2714 | EVQLLESGGGLVQPGGSLRLSCAASGFTFSRHAMNWVRQAPGKGLEWVSGISGSGDETY |
| | | YADSVKGRFTISRDNSKNTLYLQMNSLRAEDTAVYYCARDLPASYYDSSGYYWHNGMD |
| | | VWGQGTLVTVSS |
| 2A-H5 | 2715 | EVQLLESGGGLVQPGGSLRLSCAASGFTFSDFAMAWVRQAPGKGLEWVSAISGSGDITYY |
| | | ADSVKGRFTISRDNSKNTLYLQMNSLRAEDTAVYYCAREADCLPSPWYLDLWGQGTLVT |
| | | VSS |
| 2A-H6 | 2716 | EVQLLESGGGLVQPGGSLRLSCAASGFTFSDFAMAWVRQAPGKGLEWVSAISGSGDITYY |
| | | ADSVKGRFTISRDNSKNTLYLQMNSLRAEDTAVYYCAREADGLHSPWHFDLWGQGTLVT |
| | | VSS |
| 2A-H7 | 2717 | EVQLLESGGGLVQPGGSLRLSCAASGFTFSNYPMNWVRQAPGKGLEWVSTISGSGGNTFY |
| | | ADSVKGRFTISRDNSKNTLYLQMNSLRAEDTAVYYCVRHDEYSFDYWGQGTLVTVSS |
| 2A-H8 | 2718 | EVQLLESGGGLVQPGGSLRLSCAASGFTFSDFAMAWVRQAPGKGLEWVSAITGSGDITYY |
| | | ADSVKGRFTISRDNSKNTLYLQMNSLRAEDTAVYYCAREADGLHSPWHFDLWGQGTLVT |
| | | VSS |
| 2A-H9 | 2719 | EVQLLESGGGLVQPGGSLRLSCAASGFTFSDYPMNWVRQAPGKGLEWVSTISGSGGITFY |
| | | ADSVKGRFTISRDNSKNTLYLQMNSLRAEDTAVYYCVRHDEYSFDYWGQGTLVTVSS |
| 2A-H10 | 2720 | EVQLLESGGGLVQPGGSLRLSCAASGFTFSDYPMNWVRQAPGKGLEWVSAISGSGDNTY |
| | | YADSVKGRFTISRDNSKNTLYLQMNSLRAEDTAVYYCVRHDEYSFDYWGQGTLVTVSS |
| 2A-H11 | 2721 | EVQLLESGGGLVQPGGSLRLSCAASGFTFSDFAMAWVRQAPGKGLEWVSAITGTGDITYY |
| | | ADSVKGRFTISRDNSKNTLYLQMNSLRAEDTAVYYCAREADGLHSPWGQGTLVTVSS |
| 2A-H12 | 2722 | EVQLLESGGGLVQPGGSLRLSCAASGFTFSDYPMNWVRQAPGKGLEWVSAITGSGDITYY |
| | | ADSVKGRFTISRDNSKNTLYLQMNSLRAEDTAVYYCVRHDEYSFDYWGQGTLVTVSS |
| 2A-H13 | 2723 | EVQLLESGGGLVQPGGSLRLSCAASGFTFSDFAMAWVRQAPGKGLEWVSAISGSGDITYY |
| | | ADSVKGRFTISRDNSKNTLYLQMNSLRAEDTAVYYCAREADGLHSPWHFDLWGQGTLVT |
| | | VSS |
| 2A-H14 | 2724 | EVQLLESGGGLVQPGGSLRLSCAASGFTFSDFAMAWVRQAPGKGLEWVSAISGSGDITYY |
| | | ADSVKGRFTISRDNSKNTLYLQMNSLRAEDTAVYYCAREADGLHSPWHFDLWGQGTLVT |
| | | VSS |
| 2A-H15 | 2725 | EVQLLESGGGLVQPGGSLRLSCAASGFTFPRYAMSWVRQAPGKGLEWVSTISGSGSTTYY |
| | | ADSVKGRFTISRDNSKNTLYLQMNSLRAEDTAVYYCARLIDAFDIWGQGTLVTVSS |
| 2A-L1 | 2726 | DIQMTQSPSSLSASVGDRVTITCRASQSIHRFLNWYQQKPGKAPKLLIYAASNLHSGVPSRF |
| | | SGSGSGTDFTLTISSLQPEDFATYYCQQSYGLPPTFGQGTKVEIK |
| 2A-L2 | 2727 | DIQMTQSPSSLSASVGDRVTITCRASQSIHISLNWYQQKPGKAPKLLIYLASPLASGVPSRFS |
| | | GSGSGTDFTLTISSLQPEDFATYYCQQSYSAPPYTFGQGTKVEIK |
| 2A-L3 | 2728 | DIQMTQSPSSLSASVGDRVTITCRASQSIHTYLNWYQQKPGKAPKLLIYAASALASGVPSR |
| | | FSGSGSGTDFTLTISSLQPEDFATYYCQQSYSAPPYTFGQGTKVEIK |
| 2A-L4 | 2729 | DIQMTQSPSSLSASVGDRVTITCRASQTINTYLNWYQQKPGKAPKLLIYSASTLQSGVPSRF |
| | | SGSGSGTDFTLTISSLQPEDFATYYCQQSYSTFTFGQGTKVEIK |
| 2A-L5 | 2730 | DIQMTQSPSSLSASVGDRVTITCRASQNIHTYLNWYQQKPGKAPKLLIYAASTFAKGVPSR |
| | | FSGSGSGTDFTLTISSLQPEDFATYYCQQSYSAPPYTFGQGTKVEIK |
| 2A-L6 | 2731 | DIQMTQSPSSLSASVGDRVTITCRASQSIDTYLNWYQQKPGKAPKLLIYAASALASGVPSR |
| | | FSGSGSGTDFTLTISSLQPEDFATYYCQQSYSAPPYTFGQGTKVEIK |
| 2A-L7 | 2732 | DIQMTQSPSSLSASVGDRVTITCRASQSIGNYLNWYQQKPGKAPKLLIYGVSSLQSGVPSRF |
| | | SGSGSGTDFTLTISSLQPEDFATYYCQQSHSAPLTFGQGTKVEIK |
| 2A-L8 | 2733 | DIQMTQSPSSLSASVGDRVTITCRASQSIDTYLNWYQQKPGKAPKLLIYAASALASGVPSR |
| | | FSGSGSGTDFTLTISSLQPEDFATYYCQQSYSAPPYTFGQGTKVEIK |
| 2A-L9 | 2734 | DIQMTQSPSSLSASVGDRVTITCRASQSIDNYLNWYQQKPGKAPKLLIYGVSALQSGVPSR |
| | | FSGSGSGTDFTLTISSLQPEDFATYYCQQSHSAPPYFFGQGTKVEIK |
| 2A-L10 | 2735 | DIQMTQSPSSLSASVGDRVTITCRASQSIDTYLNWYQQKPGKAPKLLIYGASALESGVPSRF |
| | | SGSGSGTDFTLTISSLQPEDFATYYCQQSHSAPPYFFGQGTKVEIK |
| 2A-L11 | 2736 | DIQMTQSPSSLSASVGDRVTITCRASQSIDTYLNWYQQKPGKAPKLLIYAASALASGVPSR |
| | | FSGSGSGTDFTLTISSLQPEDFATYYCQQSYSAPPYTFGQGTKVEIK |
| 2A-L12 | 2737 | DIQMTQSPSSLSASVGDRVTITCRASQSIDTYLNWYQQKPGKAPKLLIYGVSALQSGVPSR |
| | | FSGSGSGTDFTLTISSLQPEDFATYYCQQSYSAPPYFFGQGTKVEIK |
| 2A-L13 | 2738 | DIQMTQSPSSLSASVGDRVTITCRASQSIDTYLNWYQQKPGKAPKLLIYAASALASGVPSR |
| | | FSGSGSGTDFTLTISSLQPEDFATYYCQQSYSAPPYTFGQGTKVEIK |
| 2A-L14 | 2739 | DIQMTQSPSSLSASVGDRVTITCRASQSIDNYLNWYQQKPGKAPKLLIYGVSALQSGVPSR |
| | | FSGSGSGTDFTLTISSLQPEDFATYYCQQSHSAPLTFGQGTKVEIK |
| 2A-L15 | 2740 | DIQMTQSPSSLSASVGDRVTITCRASQRIGTYLNWYQQKPGKAPKLLIYAASNLEGGVPSR |
| | | FSGSGSGTDFTLTISSLQPEDFATYYCQQNYSTTWTFGQGTKVEIK |
| 2A-H16 | 2741 | EVQLLESGGGLVQPGGSLRLSCAASGFTFSSYAMSWVRQAPGKGLEWVSVISGSGGSTYY |
| | | ADSVKGRFTISRDNSKNTLYLQMNSLRAEDTAVYYCAREGYRDYLWYFDLWGQGTLVT |
| | | VSS |
| 2A-H17 | 2742 | EVQLLESGGGLVQPGGSLRLSCAASGFTFSNYAMSWVRQAPGKGLEWVSAISGSAGSTYY |
| | | ADSVKGRFTISRDNSKNTLYLQMNSLRAEDTAVYYCARVRQGLRRTWYYFDYWGQGTL |
| | | VTVSS |
| 2A-H18 | 2743 | EVQLLESGGGLVQPGGSLRLSCAASGFTFSSYAMYWVRQAPGKGLEWVSAISGSAGSTYY |
| | | ADSVKGRFTISRDNSKNTLYLQMNSLRAEDTAVYYCARDTNDFWSGYSIFDPWGQGTLV |
| | | TVSS |
| 2A-H19 | 2744 | EVQLLESGGGLVQPGGSLRLSCAASGFTFSSYTMSWVRQAPGKGLEWVSVISGSGGSTYY |
| | | ADSVKGRFTISRDNSKNTLYLQMNSLRAEDTAVYYCAREGYRDYLWYFDLWGQGTLVT |
| | | VSS |
| 2A-H20 | 2745 | EVQLLESGGGLVQPGGSLRLSCAASGFTFSSYDMSWVRQAPGKGLEWVSVISGSGGSTYY |
| | | ADSVKGRFTISRDNSKNTLYLQMNSLRAEDTAVYYCAKGPLVGWYFDLWGQGTLVTVSS |
| 2A-L16 | 2746 | DIQMTQSPSSLSASVGDRVTITCTGTSSDVGSYDLVSWYQQKPGKAPKLLIYEGNKRPSGV |
| | | PSRFSGSGSGTDFTLTISSLQPEDFATYYCCSYAGSSVVFGQGTKVEIK |
| 2A-L17 | 2747 | DIQMTQSPSSLSASVGDRVTITCTGTSSDVGSSNLVSWYQQKPGKAPKLLIYEGSKRPSGV |
| | | PSRFSGSGSGTDFTLTISSLQPEDFATYYCCSYAGSLYVFGQGTKVEIK |
| 2A-L18 | 2748 | DIQMTQSPSSLSASVGDRVTITCTGTSSDIGSYNLVSWYQQKPGKAPKLLIYEGTKRPSGVP |
| | | SRFSGSGSGTDFTLTISSLQPEDFATYYCCSYAGSRTYVFGQGTKVEIK |
| 2A-L19 | 2749 | DIQMTQSPSSLSASVGDRVTITCTGTSTDVGSYNLVSWYQQKPGKAPKLLIYEGTKRPSGV |
| | | PSRFSGSGSGTDFTLTISSLQPEDFATYYCCSYAGSYTSVVFGQGTKVEIK |
| 2A-L20 | 2750 | DIQMTQSPSSLSASVGDRVTITCTGTSSNVGSYNLVSWYQQKPGKAPKLLIYEGTKRPSGV |
| | | PSRFSGSGSGTDFTLTISSLQPEDFATYYCCSYAGSSSFVVFGQGTKVEIK |
| 3A-H1 | 2751 | EVQLLESGGGLVQPGGSLRLSCAASGFTFRSHAMSWVRQAPGKGLEWVSSISGGGASTYY |
| | | ADSVKGRFTISRDNSKNTLYLQMNSLRAEDTAVYYCARVKYLTTSSGWPRPYFDNWGQG |
| | | TLVTVSS |
| 3A-H2 | 2752 | EVQLLESGGGLVQPGGSLRLSCAASGFTFSAYSMSWVRQAPGKGLEWVSAISGSGGSRYY |
| | | ADSVKGRFTISRDNSKNTLYLQMNSLRAEDTAVYYCGRSKWPQANGAFDIWGQGTLVTV |
| | | SS |
| 3A-H3 | 2753 | EVQLLESGGGLVQPGGSLRLSCAASGFMFGNYAMSWVRQAPGKGLEWVAAISGSGGSTY |
| | | YADSVKGRFTISRDNSKNTLYLQMNSLRAEDTAVYYCAKDRGYSSSWYGGFDYWGQGT |
| | | LVTVSS |
| 3A-H4 | 2754 | EVQLLESGGGLVQPGGSLRLSCAASGFTFRNHAMAWVRQAPGKGLEWVSGISGSGGTTY |
| | | YGDSVKGRFTISRDNSKNTLYLQMNSLRAEDTAVYYCARGTRFLQWSLPLDVWGQGTLV |
| | | TVSS |
| 3A-H5 | 2755 | EVQLLESGGGLVQPGGSLRLSCAASGFTIPNYAMSWVRQAPGKGLEWVSGISGAGASTYY |
| | | ADSVKGRFTISRDNSKNTLYLQMNSLRAEDTAVYYCARHTWWKGAGFFDHWGQGTLVT |
| | | VSS |
| 3A-H6 | 2756 | EVQLLESGGGLVQPGGSLRLSCAASGFTFRNYAMAWVRQAPGKGLEWVSGISGSGGTTY |
| | | YGDSVKGRFTISRDNSKNTLYLQMNSLRAEDTAVYYCARGTRFLEWSLPLDVWGQGTLV |
| | | TVSS |
| 3A-H7 | 2757 | EVQLLESGGGLVQPGGSLRLSCAASGFTIRNYAMSWVRQAPGKGLEWVSSISGGGASTYY |
| | | ADSVKGRFTISRDNSKNTLYLQMNSLRAEDTAVYYCARVKYLTTSSGWPRPYFDNWGQG |
| | | TLVTVSS |
| 3A-H8 | 2758 | EVQLLESGGGLVQPGGSLRLSCAASGFTIPNYAMSWVRQAPGKGLEWVSGISGSGASTYY |
| | | ADSVKGRFTISRDNSKNTLYLQMNSLRAEDTAVYYCARHTWWKGAGFFDHWGQGTLVT |
| | | VSS |
| 3A-H9 | 2759 | EVQLLESGGGLVQPGGSLRLSCAASGFTITNYAMSWVRQAPGKGLEWVSGISGSGAGTYY |
| | | ADSVKGRFTISRDNSKNTLYLQMNSLRAEDTAVYYCARHAWWKGAGFFDHWGQGTLVT |
| | | VSS |
| 3A-H10 | 2760 | EVQLLESGGGLVQPGGSLRLSCAASGFTFRSHAMSWVRQAPGKGLEWVSSISGGGASTYY |
| | | ADSVKGRFTISRDNSKNTLYLQMNSLRAEDTAVYYCARVKYLTTSSGWPRPYFDNWGQG |
| | | TLVTVSS |
| 3A-H11 | 2761 | EVQLLESGGGLVQPGGSLRLSCAASGFTITNYAMSWVRQAPGKGLEWVSGISGSGASTYY |
| | | ADSVKGRFTISRDNSKNTLYLQMNSLRAEDTAVYYCARHTWWKGAGFFDHWGQGTLVT |
| | | VSS |
| 3A-H12 | 2762 | EVQLLESGGGLVQPGGSLRLSCAASGFTFRSHAMNWVRQAPGKGLEWVSAISGSGGSTN |
| | | YADSVKGRFTISRDNSKNTLYLQMNSLRAEDTAVYYCARGLKFLEWLPSAFDIWGQGTL |
| | | VTVSS |
| 3A-H13 | 2763 | EVQLLESGGGLVQPGGSLRLSCAASGFTFRSHAMSWVRQAPGKGLEWVSSISGGGASTYY |
| | | ADSVKGRFTISRDNSKNTLYLQMNSLRAEDTAVYYCARVKYLTTSSGWPRPYFDNWGQG |
| | | TLVTVSS |
| 3A-H14 | 2764 | EVQLLESGGGLVQPGGSLRLSCAASGFTFRSYAMSWVRQAPGKGLEWVSSISGGGASTYY |
| | | ADSVKGRFTISRDNSKNTLYLQMNSLRAEDTAVYYCARVKYLTTSSGWPRPYFDNWGQG |
| | | TLVTVSS |
| 3A-H15 | 2765 | EVQLLESGGGLVQPGGSLRLSCAASGFTITNYAMSWVRQAPGKGLEWVSGISGSGAGTYY |
| | | ADSVKGRFTISRDNSKNTLYLQMNSLRAEDTAVYYCARHTWWKGAGFFDHWGQGTLVT |
| | | VSS |
| 3A-L1 | 2766 | DIQMTQSPSSLSASVGDRVTITCRASQSIRKYLNWYQQKPGKAPKLLIYASSTLQRGVPSRF |
| | | SGSGSGTDFTLTISSLQPEDFATYYCQQSLSTPFTFGQGTKVEIK |
| 3A-L2 | 2767 | DIQMTQSPSSLSASVGDRVTITCRASQNIKTYLNWYQQKPGKAPKLLIYAASKLQSGVPSR |
| | | FSGSGSGTDFTLTISSLQPEDFATYYCQQSYSTSPTFGQGTKVEIK |
| 3A-L3 | 2768 | DIQMTQSPSSLSASVGDRVTITCRASQTIYSYLNWYQQKPGKAPKLLIYATSTLQGGVPSRF |
| | | SGSGSGTDFTLTISSLQPEDFATYYCQHRGTFGQGTKVEIK |
| 3A-L4 | 2769 | DIQMTQSPSSLSASVGDRVTITCRASRSIRRYLNWYQQKPGKAPKLLIYASSSLQAGVPSRF |
| | | SGSGSGTDFTLTISSLQPEDFATYYCQQSYSTLLTFGQGTKVEIK |
| 3A-L5 | 2770 | DIQMTQSPSSLSASVGDRVTITCRASQSIGKYLNWYQQKPGKAPKLLIYASSSLQSGVPSRF |
| | | SGSGSGTDFTLTISSLQPEDFATYYCQQSYSPPFTFGQGTKVEIK |
| 3A-L6 | 2771 | DIQMTQSPSSLSASVGDRVTITCRASRSISRYLNWYQQKPGKAPKLLIYAASSLQAGVPSRF |
| | | SGSGSGTDFTLTISSLQPEDFATYYCQQSYSSLLTFGQGTKVEIK |
| 3A-L7 | 2772 | DIQMTQSPSSLSASVGDRVTITCRASQSIGKYLNWYQQKPGKAPKLLIYASSTLQRGVPSRF |
| | | SGSGSGTDFTLTISSLQPEDFATYYCQQSLSPPFTFGQGTKVEIK |
| 3A-L8 | 2773 | DIQMTQSPSSLSASVGDRVTITCRASQSIGRYLNWYQQKPGKAPKLLIYASSSLQSGVPSRF |
| | | SGSGSGTDFTLTISSLQPEDFATYYCQQSYSLPRTFGQGTKVEIK |
| 3A-L9 | 2774 | DIQMTQSPSSLSASVGDRVTITCRASQSIGRYLNWYQQKPGKAPKLLIYAASSLKSGVPSRF |
| | | SGSGSGTDFTLTISSLQPEDFATYYCQQSYSLPRTFGQGTKVEIK |
| 3A-L10 | 2775 | DIQMTQSPSSLSASVGDRVTITCRASQSIGKYLNWYQQKPGKAPKLLIYASSTLQRGVPSRF |
| | | SGSGSGTDFTLTISSLQPEDFATYYCQQSLSTPFTFGQGTKVEIK |
| 3A-L11 | 2776 | DIQMTQSPSSLSASVGDRVTITCRASQSIGRYLNWYQQKPGKAPKLLIYAASSLKSGVPSRF |
| | | SGSGSGTDFTLTISSLQPEDFATYYCQQSYSLPLTFGQGTKVEIK |
| 3A-L12 | 2777 | DIQMTQSPSSLSASVGDRVTITCRTSQSINTYLNWYQQKPGKAPKLLIYGASNVQSGVPSR |
| | | FSGSGSGTDFTLTISSLQPEDFATYYCQQSYRIPRTFGQGTKVEIK |
| 3A-L13 | 2778 | DIQMTQSPSSLSASVGDRVTITCRASQSIGKYLNWYQQKPGKAPKLLIYASSTLQRGVPSRF |
| | | SGSGSGTDFTLTISSLQPEDFATYYCQQSFSPPFTFGQGTKVEIK |
| 3A-L14 | 2779 | DIQMTQSPSSLSASVGDRVTITCRASQSIGKYLNWYQQKPGKAPKLLIYASSTLQRGVPSRF |
| | | SGSGSGTDFTLTISSLQPEDFATYYCQQSFSTPFTFGQGTKVEIK |
| 3A-L15 | 2780 | DIQMTQSPSSLSASVGDRVTITCRASQSIGRYLNWYQQKPGKAPKLLIYAASSLKSGVPSRF |
| | | SGSGSGTDFTLTISSLQPEDFATYYCQQSYSLPRTFGQGTKVEIK |
| 3A-H16 | 2781 | EVQLLESGGGLVQPGGSLRLSCAASGFTFTNFAMSWVRQAPGKGLEWVSAISGRGGGTY |
| | | YADSVKGRFTISRDNSKNTLYLQMNSLRAEDTAVYYCARDAHGYYYDSSGYDDWGQGT |
| | | LVTVSS |
| 3A-H17 | 2782 | EVQLLESGGGLVQPGGSLRLSCAASGFTFRSYPMSWVRQAPGKGLEWVSTISGSGGITYY |
| | | ADSVKGRFTISRDNSKNTLYLQMNSLRAEDTAVYYCAKGVYGSTVTTCHWGQGTLVTVS |
| | | S |
| 3A-H18 | 2783 | EVQLLESGGGLVQPGGSLRLSCAASGFTLTSYAMSWVRQAPGKGLEWVSAISGSGVDTY |
| | | YADSVKGRFTISRDNSKNTLYLQMNSLRAEDTAVYYCARPTNWGFDYWGQGTLVTVSS |
| 3A-H19 | 2784 | EVQLLESGGGLVQPGGSLRLSCAASGFTFINYAMSWVRQAPGKGLEWVSTISTSGGNTYY |
| | | ADSVKGRFTISRDNSKNTLYLQMNSLRAEDTAVYYCARADSNWASSAYWGQGTLVTVSS |
| 3A-H20 | 2785 | EVQLLESGGGLVQPGGSLRLSCAASGFPFSTYAMSWVRQAPGKGLEWVSGISVSGGFTYY |
| | | ADSVKGRFTISRDNSKNTLYLQMNSLRAEDTAVYYCARDPYSYGYYYYYGMDVWGQGT |
| | | LVTVSS |
| 3A-H21 | 2786 | EVQLLESGGGLVQPGGSLRLSCAASGFTFSTYAMGWVRQAPGKGLEWVSGISGGGVSTY |
| | | YADSVKGRFTISRDNSKNTLYLQMNSLRAEDTAVYYCARARNWGPSDYWGQGTLVTVS |
| | | S |
| 3A-H22 | 2787 | EVQLLESGGGLVQPGGSLRLSCAASGFIFSDYAMTWVRQAPGKGLEWVSAISGSAFYADS |
| | | VKGRFTISRDNSKNTLYLQMNSLRAEDTAVYYCARDATYSSSWYNWFDPWGQGTLVTV |
| | | SS |
| 3A-H23 | 2788 | EVQLLESGGGLVQPGGSLRLSCAASGFTFSDYAMTWVRQAPGKGLEWVSDISGSGGSTY |
| | | YADSVKGRFTISRDNSKNTLYLQMNSLRAEDTAVYYCARGTVTSFDFWGQGTLVTVSS |
| 3A-H24 | 2789 | EVQLLESGGGLVQPGGSLRLSCAASGFTFSIYAMGWVRQAPGKGLEWVSFISGSGGSTYY |
| | | ADSVKGRFTISRDNSKNTLYLQMNSLRAEDTAVYYCAKDYHSASWFSAAADYWGQGTL |
| | | VTVSS |
| 3A-H25 | 2790 | EVQLLESGGGLVQPGGSLRLSCAASGFTFASYAMTWVRQAPGKGLEWVSAISESGGSTYY |
| | | ADSVKGRFTISRDNSKNTLYLQMNSLRAEDTAVYYCAREGQEYSSGSSYFDYWGQGTLV |
| | | TVSS |
| 3A-H26 | 2791 | EVQLLESGGGLVQPGGSLRLSCAASGFTFSEYAMSWVRQAPGKGLEWVSAITGSGGSTYY |
| | | GDSVKGRFTISRDNSKNTLYLQMNSLRAEDTAVYYCARGSQTPYCGGDCPETFDYWGQG |
| | | TLVTVSS |
| 3A-H27 | 2792 | EVQLLESGGGLVQPGGSLRLSCAASGFTFDDYAMSWVRQAPGKGLEWVSGISGGGTSTY |
| | | YADSVKGRFTISRDNSKNTLYLQMNSLRAEDTAVYYCARDLYSSGWYGFDYWGQGTLV |
| | | TVSS |
| 3A-H28 | 2793 | EVQLLESGGGLVQPGGSLRLSCAASGFTFNNYAMNWVRQAPGKGLEWVSAISGSVGSTY |
| | | YADSVKGRFTISRDNSKNTLYLQMNSLRAEDTAVYYCARDNYDFWSGYYTNWFDPWGQ |
| | | GTLVTVSS |
| 3A-H29 | 2794 | EVQLLESGGGLVQPGGSLRLSCAASGFTFTNHAMSWVRQAPGKGLEWVSAISGSGSNIYY |
| | | ADSVKGRFTISRDNSKNTLYLQMNSLRAEDTAVYYCARDSLSVTMGRGVVTYYYYGMD |
| | | FWGQGTLVTVSS |
| 3A-L16 | 2795 | DIQMTQSPSSLSASVGDRVTITCRASQIIGSYLNWYQQKPGKAPKLLIYTTSNLQSGVPSRF |
| | | SGSGSGTDFTLTISSLQPEDFATYYCQQSYITPWTFGQGTKVEIK |
| 3A-L17 | 2796 | DIQMTQSPSSLSASVGDRVTITCRASQSISRYINWYQQKPGKAPKLLIYEASSLESGVPSRFS |
| | | GSGSGTDFTLTISSLQPEDFATYYCQQSHITPLTFGQGTKVEIK |
| 3A-L18 | 2797 | DIQMTQSPSSLSASVGDRVTITCRASQSIYTYLNWYQQKPGKAPKLLIYSASNLHSGVPSRF |
| | | SGSGSGTDFTLTISSLQPEDFATYYCQQSDTTPWTFGQGTKVEIK |
| 3A-L19 | 2798 | DIQMTQSPSSLSASVGDRVTITCRASQSIATYLNWYQQKPGKAPKLLIYGASSLEGGVPSRF |
| | | SGSGSGTDFTLTISSLQPEDFATYYCQQTFSSPFTFGQGTKVEIK |
| 3A-L20 | 2799 | DIQMTQSPSSLSASVGDRVTITCRASQNINTYLNWYQQKPGKAPKLLIYSASSLQSGVPSRF |
| | | SGSGSGTDFTLTISSLQPEDFATYYCQQSSLTPWTFGQGTKVEIK |
| 3A-L21 | 2800 | DIQMTQSPSSLSASVGDRVTITCRASQGIATYLNWYQQKPGKAPKLLIYYASNLQSGVPSR |
| | | FSGSGSGTDFTLTISSLQPEDFATYYCQQSYSTRFTFGQGTKVEIK |
| 3A-L22 | 2801 | DIQMTQSPSSLSASVGDRVTITCRASERISNYLNWYQQKPGKAPKLLIYTASNLESGVPSRF |
| | | SGSGSGTDFTLTISSLQPEDFATYYCQQSYTPPRTFGQGTKVEIK |
| 3A-L23 | 2802 | DIQMTQSPSSLSASVGDRVTITCRASQSISSSLNWYQQKPGKAPKLLIYAASRLQDGVPSRF |
| | | SGSGSGTDFTLTISSLQPEDFATYYCQQSYSTPRSFGQGTKVEIK |
| 3A-L24 | 2803 | DIQMTQSPSSLSASVGDRVTITCRASQSISSHLNWYQQKPGKAPKLLIYRASTLQSGVPSRF |
| | | SGSGSGTDFTLTISSLQPEDFATYYCQQTYNTPQTFGQGTKVEIK |
| 3A-L25 | 2804 | DIQMTQSPSSLSASVGDRVTITCRASQSISSYLIWYQQKPGKAPKLLIYAASRLHSGVPSRFS |
| | | GSGSGTDFTLTISSLQPEDFATYYCQQGYNTPRTFGQGTKVEIK |
| 3A-L26 | 2805 | DIQMTQSPSSLSASVGDRVTITCRASPSISTYLNWYQQKPGKAPKLLIYTASRLQTGVPSRF |
| | | SGSGSGTDFTLTISSLQPEDFATYYCQQTYSTPSSFGQGTKVEIK |
| 3A-L27 | 2806 | DIQMTQSPSSLSASVGDRVTITCRASQNIAKYLNWYQQKPGKAPKLLIYGASGLQSGVPSR |
| | | FSGSGSGTDFTLTISSLQPEDFATYYCQQSHSPPITFGQGTKVEIK |
| 3A-L28 | 2807 | DIQMTQSPSSLSASVGDRVTITCRASQSIGTYLNWYQQKPGKAPKLLIYAASNLHSGVPSR |
| | | FSGSGSGTDFTLTISSLQPEDFATYYCQESYSAPYTFGQGTKVEIK |
| 3A-L29 | 2808 | DIQMTQSPSSLSASVGDRVTITCRASQSISPYLNWYQQKPGKAPKLLIYKASSLQSGVPSRF |
| | | SGSGSGTDFTLTISSLQPEDFATYYCQQSSSTPYTFGQGTKVEIK |
| 4A-H51 | 2809 | EVQLVESGGGLVQPGGSLRLSCAASGPGTAIMGWFRQAPGKEREFVARISTSGGSTKYAD |
| | | SVKGRFTISADNSKNTAYLQMNSLKPEDTAVYYCARTTVTTPPLIWGQGTLVTVSS |
| 4A-H52 | 2810 | EVQLVESGGGLVQPGGSLRLSCAASGRSFSNSVMGWFRQAPGKEREFVARITWNGGSTY |
| | | YADSVKGRFTISADNSKNTAYLQMNSLKPEDTAVYYCATTENPNPRWGQGTLVTVSS |
| 4A-H53 | 2811 | EVQLVESGGGLVQPGGSLRLSCAASGRTFGDDTMGWFRQAPGKEREFVAAVSWSGSGVY |
| | | YADSVKGRFTITADNSKNTAYLQMNSLKPENTAVYYCATDPPLFWGQGTLVTVSS |
| 4A-H54 | 2812 | EVQLVESGGGLVQPGGSLRLSCAASGRTFSDARMGWFRQAPGKEREFVGAVSWSGGTTV |
| | | YADSVKGRFTISADNSKNTAYLQMNSLKPEDTAVYYCATTEDPYPRWGQGTLVTVSS |
| 4A-H49 | 2813 | EVQLVESGGGLVQPGGSLRLSCAASGRTFGDYIMGWFRQAPGKERESVAAINWSAGYTA |
| | | YADSVKGRFTISADNSKNTAYLQMNSLKPEDTAVYYCARASPNTGWHFDHWGQGTLVT |
| | | VSS |
| 4A-H55 | 2814 | EVQLVESGGGLVQPGGSLRLSCAASGSGLSINAMGWFRQAPGKERESVAAISWSGGSTYT |
| | | AYADSVKGRFTISADNSKNTAYLQMNSLKPEDTAVYYCAAYQAGWGDWGQGTLVTVSS |
| 4A-H39 | 2815 | EVQLVESGGGLVQPGGSLRLSCAASGRTFSNAAMGWFRQAPGKEREFVARILWTGASRN |
| | | YADSVKGRFTISADNSKNTAYLQMNSLKPEDTAVYYCATTENPNPRWGQGTLVTVSS |
| 4A-H56 | 2816 | EVQLVESGGGLVQPGGSLRLSCAASGFSLDYYGMGWFRQAPGKERESVAAISWNGDFTA |
| | | YADSVKGRFTISADNSKNTAYLQMNSLKPEDTAVYYCAKRANPTGAYFDYWGQGTLVT |
| | | VSS |
| 4A-H33 | 2817 | EVQLVESGGGLVQPGGSLRLSCAASGFTFSRHDMGWFRQAPGKEREFVAGINWESGSTN |
| | | YADSVKGRFTISADNSKNTAYLQMNSLKPEDTAVYYCAADRGVYGGRWYRTSQYTWGQ |
| | | GTLVTVSS |
| 4A-H57 | 2818 | EVQLVESGGGLVQPGGSLRLSCAASGLTFRNYAMGWFRQAPGKEREFVAAIGSGGYTDY |
| | | ADSVKGRFTISADNSKNTAYLQMNSLKPEDTAVYYCAVKPGWVARDPSQYNWGQGTLV |
| | | TVSS |
| 4A-H25 | 2819 | EVQLVESGGGLVQPGGSLRLSCAASGGTFSRYAMGWFRQAPGKEREWVSAVDSGGSTYY |
| | | ADSVKGRFTISADNSKNTAYLQMNSLKPEDTAVYYCAASPSLRSAWQWGQGTLVTVSS |
| 4A-H58 | 2820 | EVQLVESGGGLVQPGGSLRLSCAASGFTLDYYDMGWFRQAPGKEREFVAAVTWSGGSTY |
| | | YADSVKGRFTISADNSKNTAYLQMNSLKPEDTAVYYCAADRRGLASTRAADYDWGQGT |
| | | LVTVSS |
| 4A-H59 | 2821 | EVQLVESGGGLVQPGGSLRLSCAASGRTFGDYIMGWFRQAPGKEREFVAAINWSAGYTP |
| | | YADSVKGRFTISADNSKNTAYLQMNSLKPEDTAVYYCATAPPLFCWHFDLWGQGTLVTV |
| | | SS |
| 4A-H6 | 2822 | EVQLVESGGGLVQPGGSLRLSCAASGRTFGDDIMGWFRQAPGKEREFVAAIHWSAGYTR |
| | | YADSVKGRFTISADNSKNTAYLQMNSLKPEDTAVYYCATDPPLFWGHVDLWGQGTLVT |
| | | VSS |
| 4A-H61 | 2823 | EVQLVESGGGLVQPGGSLRLSCAASGRTFGDYIMGWFRQAPGKEREIVAAINWSADYTPY |
| | | ADSVKGRFTISADNSKNTAYLQMNSLKPEDTAVYYCATAPPNTGWHFDHWGQGTLVTVS |
| | | S |
| 4A-H3 | 2824 | EVQLVESGGGLVQPGGSLRLSCAASGRTFGDYIMGWFRQAPGKEREIVAAINWSAGYTA |
| | | YADSVKGRFTISADNSKNTAYLQMNSLKPEDTAVYYCATATPNTGWHFDHWGQGTLVT |
| | | VSS |
| 4A-H62 | 2825 | EVQLVESGGGLVQPGGSLRLSCAASGRTFSDDTMGWFRQAPGKEREFVAAINWSGGSTD |
| | | YADSVKGRFTISADNSKNTAYLQMNSLKPEDTAVYYCATDPPLFWGQGTLVTVSS |
| 4A-H43 | 2826 | EVQLVESGGGLVQPGGSLRLSCAASGRTFGDDTMGWFRQAPGKEREFVAGINWSGGNTY |
| | | YADSVKGRFTISADNSKNTAYLQMNSLKPEDTAVYYCATDPPLFWGQGTLVTVSS |
| 4A-H5 | 2827 | EVQLVESGGGLVQPGGSLRLSCAASGRTFGDYIMGWFRQAPGKEREFVAAINWTGGYTS |
| | | YADSVKGRFTISADNSKNTAYLQMNSLKPEDTAVYYCATDPPLFWGQGTLVTVSS |
| 4A-H42 | 2828 | EVQLVESGGGLVQPGGSLRLSCAASGRTFGDDTMGWFRQAPGKERECVAAINWSGGNTY |
| | | YADSVKGRFTISADNSKNTAYLQMNSLKPEDTAVYYCATDPPLFWGQGTLVTVSS |
| 4A-H63 | 2829 | EVQLVESGGGLVQPGGSLRLSCAASGRTFSDYTMGWFRQAPGKEREFVAAINWSGGYTY |
| | | YADSVKGRFTISADNSKNTAYLQMNSLKPEDTAVYYCATDPPLFWGQGTLVTVSS |
| 4A-H6 | 2830 | EVQLVESGGGLVQPGGSLRLSCAASGRTFGDYGMGWFRQAPGKEREFVATINWSGALTH |
| | | YADSVKGRFTISADNSKNTAYLQMNSLKPEDTAVYYCATLPFYDFWSGYYTGYYYMDV |
| | | WGQGTLVTVSS |
| 4A-H40 | 2831 | EVQLVESGGGLVQPGGSLRLSCAASGRTFSDDTMGWFRQAPGKEREFLAGVTWSGSSTF |
| | | YADSVKGRFTISADNSKNTAYLQMNSLKPEDTAVYYCATDPPLFWGQGTLVTVSS |
| 4A-H21 | 2832 | EVQLVESGGGLVQPGGSLRLSCAASGRTFSDDIMGWFRQAPGKEREFVAAISWSGGNTHY |
| | | ADSVKGRFTISADNSKNTAYLQMNSLKPEDTAVYYCATDPPLFWGQGTLVTVSS |
| 4A-H64 | 2833 | EVQLVESGGGLVQPGGSLRLSCAASGRTFGDYIMGWFRQAPGKERESVAAINWSAGYTA |
| | | YADSVKGRFTISADNSKNTAYLQMNSLKPEDTAVYYCATASPNTGWHFDHWGQGTLVT |
| | | VSS |
| 4A-H47 | 2834 | EVQLVESGGGLVQPGGSLRLSCAASGFTFDDDYVMGWFRQAPGKEREFVAAVSGSGDDT |
| | | YYADSVKGRFTISADNSKNTAYLQMNSLKPEDTAVYYCAADRRGLASTRAADYDWGQG |
| | | TLVTVSS |
| 4A-H65 | 2835 | EVQLVESGGGLVQPGGSLRLSCAASGRTFGDYIMGWFRQAPGKEREFVAAINWSAGYTA |
| | | YADSVKGRFTISADNSKNTAYLQMNSLKPEDTAVYYCATEPPLSCWHFDLWGQGTLVTV |
| | | SS |
| 4A-H18 | 2836 | EVQLVESGGGLVQPGGSLRLSCAASGRTFGDYIMGWFRQAPGKEREIVAAINWSGGYTPY |
| | | ADSVKGRFTISADNSKNTAYLQMNSLKPEDTAVYYCATAPPNTGWHFDHWGQGTLVTVS |
| | | S |
| 4A-H66 | 2837 | EVQLVESGGGLVQPGGSLRLSCAASGRTFGDDTMGWFRQAPGKEREIVAAINWSAGYTP |
| | | YADSVKGRFTISADNSKNTAYLQMNSLKPEDTAVYYCATDPPLFCCHFDLWGQGTLVTV |
| | | SS |
| 4A-H36 | 2838 | EVQLVESGGGLVQPGGSLRLSCAASGRTFSDDTMGWFRQAPGKEREFVAAISWSGGTTR |
| | | YADSVKGRFTISADNSKNTAYLQMNSLKPEDTAVYYCATDPPLFWGQGTLVTVSS |
| 4A-H67 | 2839 | EVQLVESGGGLVQPGGSLRLSCAASGRTFSDDTMGWFRQAPGKEREFVAAINWSGDSTY |
| | | YADSVKGRFTISADNSKNTAYLQMNSLKPEDTAVYYCATDPPLFWGQGTLVTVSS |
| 4A-H16 | 2840 | EVQLVESGGGLVQPGGSLRLSCAASGRTFSDDTMGWFRQAPGKEREFVAAINWSGGTTR |
| | | YADSVKGRFTISADNSKNTAYLQMNSLKPEDTAVYYCATDPPLFWGQGTLVTVSS |
| 4A-H11 | 2841 | EVQLVESGGGLVQPGGSLRLSCAASGRTFSDDAMGWFRQAPGKEREFVAAIHWSGSSTR |
| | | YADSVKGRFTISADNSKNTAYLQMNSLKPEDTAVYYCATDPPLFWGQGTLVTVSS |
| 4A-H68 | 2842 | EVQLVESGGGLVQPGGSLRLSCAASGRTFSDDTMGWFRQAPGKERELVGTINWSGGSTY |
| | | YADSVKGRFTISADNSKNTAYLQMNSLKPEDTAVYYCATDPPLFWGQGTLVTVSS |
| 4A-H34 | 2843 | EVQLVESGGGLVQPGGSLRLSCAASGRTFGDYIMGWFRQAPGKEREFVAAINWSGGYTP |
| | | YADSVKGRFTISADNSKNTAYLQMNSLKPEDTAVYYCATDPPLFWGQGTLVTVSS |
| 4A-H28 | 2844 | EVQLVESGGGLVQPGGSLRLSCAASGRTFGDDTMGWFRQAPGKERELVAAINWNGGNT |
| | | HYADSVKGRFTISADNSKNTAYLQMNSLKPEDTAVYYCATDPPLFWGQGTLVTVSS |
| 4A-H69 | 2845 | EVQLVESGGGLVQPGGSLRLSCAASGRTFSDDAMGWFRQAPGKEREFVAAINWSGGTTR |
| | | YADSVKGRFTISADNSKNTAYLQMNSLKPEDTAVYYCATDPPLFWGQGTLVTVSS |
| 4A-H7 | 2846 | EVQLVESGGGLVQPGGSLRLSCAASGRTFGDYIMGWFRQAPGKERESVAAINWSAGYTP |
| | | YADSVKGRFTISADNSKNTAYLQMNSLKPEDTAVYYCATDPPLFWGHVDLWGQGTLVT |
| | | VSS |
| 4A-H71 | 2847 | EVQLVESGGGLVQPGGSLRLSCAASGRTFSDDTMGWFRQAPGKEREWVASINWSGGSTY |
| | | YADSVKGRFTISADNSKNTAYLQMNSLKPEDTAVYYCATDPPLFWGQGTLVTVSS |
| 4A-H23 | 2848 | EVQLVESGGGLVQPGGSLRLSCAASGRTFSDDAMGWFRQAPGKEREFVAGISWNGGSIY |
| | | YADSVKGRFTISADNSKNTAYLQMNSLKPEDTAVYYCATDPPLFWGQGTLVTVSS |
| 4A-H9 | 2849 | EVQLVESGGGLVQPGGSLRLSCAASGFTFDDYEMGWFRQAPGKEREFVAAISWRGGTTY |
| | | YADSVKGRFTISADNSKNTAYLQMNSLKPEDTAVYYCAADRRGLASTRAGDYDWGQGT |
| | | LVTVSS |
| 4A-H72 | 2850 | EVQLVESGGGLVQPGGSLRLSCAASGRTFGDDTMGWFRQAPGKEREFVAAINWSGGYTP |
| | | YADSVKGRFTISADNSKNTAYLQMNSLKPEDTAVYYCATDPPLFWGHVDLWGQGTLVT |
| | | VSS |
| 4A-H73 | 2851 | EVQLVESGGGLVQPGGSLRLSCAASGRTFSDDAMGWFRQAPGKEREFVAAINWSGGSTR |
| | | YADSVKGRFTISADNSKNTAYLQMNSLKPEDTAVYYCATDPPLFWGQGTLVTVSS |
| 4A-H29 | 2852 | EVQLVESGGGLVQPGGSLRLSCAASGVTLDDYAMGWFRQAPGKEREFVAVINWSGGSTD |
| | | YADSVKGRFTISADNSKNTAYLQMNSLKPEDTAVYYCARGGGWVPSSTSESLNWYFDRW |
| | | GQGTLVTVSS |
| 4A-H41 | 2853 | EVQLVESGGGLVQPGGSLRLSCAASGRTFGDYIMGWFRQAPGKERESVAAINWSGGTTPY |
| | | ADSVKGRFTISADNSKNTAYLQMNSLKPEDTAVYYCATDPPLFCCHVDLWGQGTLVTVS |
| | | S |
| 4A-H74 | 2854 | EVQLVESGGGLVQPGGSLRLSCAASGLTFSDDTMGWFRQAPGKEREFVAAVSWSGGNTY |
| | | YADSVKGRFTISADNSKNTAYLQMNSLKPEDTAVYYCATDPPLFWGQGTLVTVSS |
| 4A-H75 | 2855 | EVQLVESGGGLVQPGGSLRLSCAASGRTFGDDTMGWFRQAPGKEREFVAAINWTGGYTP |
| | | YADSVKGRFTISADNSKNTAYLQMNSLKPEDTAVYYCATDPPLFWGQGTLVTVSS |
| 4A-H31 | 2856 | EVQLVESGGGLVQPGGSLRLSCAASGRTFGDYIMGWFRQAPGKEREFVATINWTAGYTY |
| | | YADSVKGRFTISADNSKNTAYLQMNSLKPEDTAVYYCATDPPLFCWHFDHWGQGTLVTV |
| | | SS |
| 4A-H32 | 2857 | EVQLVESGGGLVQPGGSLRLSCAASGRTFGDDTMGWFRQAPGKEREFVAAINWSGGNTD |
| | | YADSVKGRFTISADNSKNTAYLQMNSLKPEDTAVYYCATDPPLFWGQGTLVTVSS |
| 4A-H15 | 2858 | EVQLVESGGGLVQPGGSLRLSCAASGRTFGDYTMGWFRQAPGKEREFVAAINWSGGNTY |
| | | YADSVKGRFTISADNSKNTAYLQMNSLKPEDTAVYYCATDPPLFWGQGTLVTVSS |
| 4A-H14 | 2859 | EVQLVESGGGLVQPGGSLRLSCAASGRTFSDDTMGWFRQAPGKEREFVAGINWSGNGVY |
| | | YADSVKGRFTISADNSKNTAYLQMNSLKPEDTAVYYCATDPPLFWGQGTLVTVSS |
| 4A-H76 | 2860 | EVQLVESGGGLVQPGGSLRLSCAASGRTFGDYAMGWFRQAPGKERELVAPINWSGGSTY |
| | | YADSVKGRFTISADNSKNTAYLQMNSLKPEDTAVYYCATDPPLFWGQGTLVTVSS |
| 4A-H50 | 2861 | EVQLVESGGGLVQPGGSLRLSCAASGGTFSNSGMGWFRQAPGKERELVAVVNWSGRRTY |
| | | YADSVKGRFTISADNSKNTAYLQMNSLKPEDTAVYYCAVPWMDYNRRDWGQGTLVTVS |
| | | S |
| 4A-H17 | 2862 | EVQLVESGGGLVQPGGSLRLSCAASGQLANFASYAMGWFRQAPGKEREFVAAITRSGSST |
| | | VYADSVKGRFTISADNSKNTAYLQMNSLKPEDTAVYYCATTMNPNPRWGQGTLVTVSS |
| 4A-H37 | 2863 | EVQLVESGGGLVQPGGSLRLSCAASGRTFSDDIMGWFRQAPGKEREFVAAINWTGGSTYY |
| | | ADSVKGRFTISADNSKNTAYLQMNSLKPEDTAVYYCATDPPLFWGQGTLVTVSS |
| 4A-H44 | 2864 | EVQLVESGGGLVQPGGSLRLSCAASGRTFGDYIMGWFRQAPGKEREIVAAINWSAGYTA |
| | | YADSVKGRFTISADNSKNTAYLQMNSLKPEDTAVYYCATARPNTGWHFDHWGQGTLVT |
| | | VSS |
| 4A-H77 | 2865 | EVQLVESGGGLVQPGGSLRLSCAASGRTFSDDTMGWFRQAPGKEREWVGSINWSGGSTY |
| | | YADSVKGRFTISADNSKNTAYLQMNSLKPEDTAVYYCATDPPLFWGQGTLVTVSS |
| 4A-H78 | 2866 | EVQLVESGGGLVQPGGSLRLSCAASGRTFSDDTMGWFRQAPGKEREFVAGMTWSGSSTF |
| | | YADSVKGRFTISADNSKNTAYLQMNSLKPEDTAVYYCATDPPLFWGQGTLVTVSS |
| 4A-H79 | 2867 | EVQLVESGGGLVQPGGSLRLSCAASGRTFGDYIMGWFRQAPGKERECVAAINWSGDYTD |
| | | YADSVKGRFTISADNSKNTAYLQMNSLKPEDTAVYYCATDPPLFWGQGTLVTVSS |
| 4A-H8 | 2868 | EVQLVESGGGLVQPGGSLRLSCAASGRTFGDYIMGWFRQAPGKEREFVGGINWSGGYTY |
| | | YADSVKGRFTISADNSKNTAYLQMNSLKPEDTAVYYCATDPPLFWGQGTLVTVSS |
| 4A-H81 | 2869 | EVQLVESGGGLVQPGGSLRLSCAASGRTFSDDTMGWFRQAPGKEREFVAAVNWSGGSTY |
| | | YADSVKGRFTISADNSKNTAYLQMNSLKPEDTAVYYCATDPPLFWGQGTLVTVSS |
| 4A-H82 | 2870 | EVQLVESGGGLVQPGGSLRLSCAASGRTFGDYAMGWFRQAPGKEREFVAAINWSGGYTR |
| | | YADSVKGRFTISADNSKNTAYLQMNSLKPEDTAVYYCATDPPLFWGQGTLVTVSS |
| 4A-H83 | 2871 | EVQLVESGGGLVQPGGSLRLSCAASGRTFGDDTMGWFRQAPGKEREFVAAINWSGGYTP |
| | | YADSVKGRFTISADNSKNTAYLQMNSLKPEDTAVYYCATDPPLFWGQGTLVTVSS |
| 4A-H35 | 2872 | EVQLVESGGGLVQPGGSLRLSCAASGRTFGDYIMGWFRQAPGKERESVAAINWSAGYTA |
| | | YADSVKGRFTISADNSKNTAYLQMNSLKPEDTAVYYCARASPNTGWHFDRWGQGTLVT |
| | | VSS |
| 4A-H45 | 2873 | EVQLVESGGGLVQPGGSLRLSCAASGRTFGDYIMGWFRQAPGKEREFVAAINWSGGYTH |
| | | YADSVKGRFTISADNSKNTAYLQMNSLKPEDTAVYYCATDPPLFWGQGTLVTVSS |
| 4A-H84 | 2874 | EVQLVESGGGLVQPGGSLRLSCAASGRTFSDDTMGWFRQAPGKEREFVAAITWSGGRTR |
| | | YADSVKGRFTISADNSKNTAYLQMNSLKPEDTAVYYCATDRPLFWGQGTLVTVSS |
| 4A-H85 | 2875 | EVQLVESGGGLVQPGGSLRLSCAASGRTFGDYIMGWFRQAPGKERESVAAINWSGGYTA |
| | | YADSVKGRFTISADNSKNTAYLQMNSLKPEDTAVYYCATASPNTGWHFDHWGQGTLVT |
| | | VSS |
| 4A-H86 | 2876 | EVQLVESGGGLVQPGGSLRLSCAASGRTFSDDTMGWFRQAPGKEREFVAAIHWSGSSTRY |
| | | ADSVKGRFTISADNSKNTAYLQMNSLKPEDTAVYYCATDPPLFWGQGTLVTVSS |
| 4A-H87 | 2877 | EVQLVESGGGLVQPGGSLRLSCAASGRTFSDYTMGWFRQAPGKEREWVAAINWSGGTTY |
| | | YADSVKGRFTISADNSKNTAYLQMNSLKPEDTAVYYCATDPPLFWGQGTLVTVSS |
| 4A-H88 | 2878 | EVQLVESGGGLVQPGGSLRLSCAASGRTFGDDTMGWFRQAPGKEREFVAAINWSGDNTH |
| | | YADSVKGRFTISADNSKNTAYLQMNSLKPEDTAVYYCATDPPLFWGQGTLVTVSS |
| 4A-H89 | 2879 | EVQLVESGGGLVQPGGSLRLSCAASGFAFGDNWIGWFRQAPGKEREWVASISSGGTTAY |
| | | ADNVKGRFTIIADNSKNTAYLQMNSLKPEDTAVYYCAHRGGWLRPWGYWGQGTLVTVS |
| | | S |
| 4A-H9 | 2880 | EVQLVESGGGLVQPGGSLRLSCAASGRTFSDDAMGWFRQAPGKEREFVGRINWSGGNTY |
| | | YADSVKGRFTISADNSKNTAYLQMNSLKPEDTAVYYCATDPPLFWGQGTLVTVSS |
| 4A-H91 | 2881 | EVQLVESGGGLVQPGGSLRLSCAASGRTFSDDTMGWFRQAPGKEREFVGGISWSGGNTY |
| | | YADSVKGRFTISADNSKNTAYLQMNSLKPEDTAVYYCATDPPLFWGQGTLVTVSS |
| 4A-H92 | 2882 | EVQLVESGGGLVQPGGSLRLSCAASGRTFSDDTMGWFRQAPGKEREFVAAINWSGGSTY |
| | | YADSVKGRFTISADNSKNTAYLQMNSLKPEDTAVYYCATDPPLFWGQGTLVTVSS |
| 4A-H46 | 2883 | EVQLVESGGGLVQPGGSLRLSCAASGRTFGDDTMGWFRQAPGKEREFVAAINWSGGYTY |
| | | YADSVKGRFTISADNSKNTAYLQMNSLKPEDTAVYYCATDPPLFWGQGTLVTVSS |
| 4A-H20 | 2884 | EVQLVESGGGLVQPGGSLRLSCAASGRTFGDYIMGWFRQAPGKEREFVAAINWSADYTA |
| | | YADSVKGRFTISADNSKNTAYLQMNSLKPEDTAVYYCATDPPLFCWHFDHWGQGTLVTV |
| | | SS |
| 4A-H93 | 2885 | EVQLVESGGGLVQPGGSLRLSCAASGRTFSDDAMGWFRQAPGKEREFVAAINWSGSSTY |
| | | YADSVKGRFTISADNSKNTAYLQMNSLKPEDTAVYYCATDPPLFWGQGTLVTVSS |
| 4A-H4 | 2886 | EVQLVESGGGLVQPGGSLRLSCAASGRTFGDYIMGWFRQAPGKEREMVAA1NWIAGYTA |
| | | DADSVRRLFTITADNNKNTAHLMMNLLKPENTAVYYCAEPSPNTGWHFDHWGQGTLVT |
| | | VSS |
| 4A-H2 | 2887 | EVQLVESGGGLVQPGGSLRLSCAASGRTFGDDTMGWFRQAPGKEREFVAAINWSGGNTP |
| | | YADSVKGRFTISADNSKNTAYLQMNSLKPEDTAVYYCATDPPLFWGQGTLVTVSS |
| 4A-H94 | 2888 | EVQLVESGGGLVQPGGSLRLSCAASGRTFSDDTMGWFRQAPGKEREFVAAINWSGDNTH |
| | | YADSVKGRFTISADNSKNTAYLQMNSLKPEDTAVYYCATDPPLFWGQGTLVTVSS |
| 4A-H95 | 2889 | EVQLVESGGGLVQPGGSLRLSCAASGRTFGDYIMGWFRQAPGKEREIVAAINWSAGYTA |
| | | YADSVKGRFTISADNSKNTAYLQMNSLKPEDTAVYYCATAPPLFCWHFDHWGQGTLVTV |
| | | SS |
| 4A-H12 | 2890 | EVQLVESGGGLVQPGGSLRLSCAASGFTFGDYVMGWFRQAPGKEREIVAAINWNAGYTA |
| | | YADSVRGLFTITADNSKNTAYLQMNSLKPEDTAVYYCAKASPNTGWHFDHWGQGTLVT |
| | | VSS |
| 4A-H30 | 2891 | EVQLVESGGGLVQPGGSLRLSCAASGRTFGDYTMGWFRQAPGKEREFVAAINWTGGYTY |
| | | YADSVKGRFTISADNSKNTAYLQMNSLKPEDTAVYYCATDPPLFWGQGTLVTVSS |
| 4A-H27 | 2892 | EVQLVESGGGLVQPGGSLRLSCAASGRTFGDYIMGWFRQAPGKEREIVAAINWSAGYTA |
| | | YADSVKGLFTITADNSKNTAYLQMNILKPEDTAVYYCARATPNTGWHFDHWGQGTLVT |
| | | VSS |
| 4A-H22 | 2893 | EVQLVESGGGLVQPGGSLRLSCAASGRTFGDYIMGWFRQAPGKEREFVAAINWSGDNTH |
| | | YADSVKGRFTISADNSKNTAYLQMNSLKPEDTAVYYCATDPPLFWGQGTLVTVSS |
| 4A-H96 | 2894 | EVQLVESGGGLVQPGGSLRLSCAASGRTFGDYIMGWFRQAPGKEREIVAAINWSAGYTPY |
| | | ADSVKGRFTISADNSKNTAYLQMNSLKPEDTAVYYCATDPPLFCCHFDHWGQGTLVTVS |
| | | S |
| 4A-H97 | 2895 | EVQLVESGGGLVQPGGSLRLSCAASGRTFGDYIMGWFRQAPGKERESVAAINWSAGYTA |
| | | YADSVKGRFTISADNSKNTAYLQMNSLKPEDTAVYYCATAPPNTGWHFDHWGQGTLVT |
| | | VSS |
| 4A-H98 | 2896 | EVQLVESGGGLVQPGGSLRLSCAASGFTWGDYTMGWFRQAPGKEREFVAAINWSGGNT |
| | | YYADSVKGRFTISADNSKNTAYLQMNSLKPEDTAVYYCAADRRGLASTRAADYDWGQG |
| | | TLVTVSS |
| 4A-H99 | 2897 | EVQLVESGGGLVQPGGSLRLSCAASGIPSTLRAMGWFRQAPGKEREFVAAVSSLGPFTRY |
| | | ADSVKGRFTISADNSKNTAYLQMNSLKPEDTAVYYCAAKPGWVARDPSQYNWGQGTLV |
| | | TVSS |
| 4A- | 2898 | EVQLVESGGGLVQPGGSLRLSCAASGFSFDDDYVMGWFRQAPGKEREFVAAINWSGGST |
| H100 | | YYADSVKGRFTISADNSKNTAYLQMNSLKPEDTAVYYCAADRRGLASTRAADYDWGQG |
| | | TLVTVSS |
| 4A- | 2899 | EVQLVESGGGLVQPGGSLRLSCAASGRTFSNAAMGWFRQAPGKEREFVARILWTGASRS |
| H101 | | YADSVKGRFTISADNSKNTAYLQMNSLKPEDTAVYYCATTENPNPRWGQGTLVTVSS |
| 4A- | 2900 | EVQLVESGGGLVQPGGSLRLSCAASGGTFGVYHMGWFRQAPGKEREGVAAINMSGDDS |
| H102 | | AYADSVKGRFTISADNSKNTAYLQMNSLKPEDTAVYYCAILVGPGQVEFDHWGQGTLVT |
| | | VSS |
| 4A- | 2901 | EVQLVESGGGLVQPGGSLRLSCAASGFTFSSYYMGWFRQAPGKEREFVARI-- |
| H103 | | SGSTFYADSVKGRFTISADNSKNTAYLQMNSLKPEDTAVYYCAALPFVCPSGSYSDYGDE |
| | | YDWGQGTLVTVSS |
| 4A- | 2902 | EVQLVESGGGLVQPGGSLRLSCAASGRTFSGDFMGWFRQAPGKEREFVGRINWSGGNTY |
| H104 | | YADSVRGLFTITADNNKNTAYLMMNLLKPEDTAVYYCPTDPPLFWGLGTLVTWSS |
| 4A- | 2903 | EVQLVESGGGLVQPGGSLRLSCAASGSTLRDYAMGWFRQAPGKERESVAAITWSGGSTA |
| H105 | | YADSVKGRFTISADNSKNTAYLQMNSLKPEDTAVYYCASLLAGDRYFDYWGQGTLVTVS |
| | | S |
| 4A- | 2904 | EVQLVESGGGLVQPGGSLRLSCAASGFTFDDYTMGWFRQAPGKEREFVAAITDNGGSKY |
| H106 | | YADSVKGRFTISADNSKNTAYLQMNSLKPEDTAVYYCAADRRGLASTRAADYDWGQGT |
| | | LVTVSS |
| 4A- | 2905 | EVQLVESGGGLVQPGGSLRLSCAASGGTFSSYGMGWFRQAPGKEREFVAAINWSGASTY |
| H107 | | YADSVKGRFTISADNSKNTAYLQMNSLKPEDTAVYYCARDWRDRTWGNSLDYWGQGTL |
| | | VTVSS |
| 4A- | 2906 | EVQLVESGGGLVQPGGSLRLSCAASGFSFDDDYVMGWFRQAPGKEREFVAAISWSEDNT |
| H108 | | YYADSVKGRFTISADNSKNTAYLQMNSLKPEDTAVYYCAADRRGLASTRAADYDWGQG |
| | | TLVTVSS |
| 4A- | 2907 | EVQLVESGGGLVQPGGSLRLSCAASGFSFDDDYVMGWFRQAPGKEREFVAAVSGSGDDT |
| H109 | | YYADSVKGRFTISADNSKNTAYLQMNSLKPEDTAVYYCAADRRGLASTRAADYDWGQG |
| | | TLVTVSS |
| 4A-H11 | 2908 | EVQLVESGGGLVQPGGSLRLSCAASGNIAAINVMGWFRQAPGKEREFVAAISASGRRTDY |
| | | ADSVKGRFTISADNSKNTAYLQMNSLKPEDTAVYYCARRVYYYDSSGPPGVTFDIWGQG |
| | | TLVTVSS |
| 4A- | 2909 | EVQLVESGGGLVQPGGSLRLSCAASGIITSRYVMGWFRQAPGKEREGVAAISTGGSTIYAD |
| H111 | | SVKGRFTISADNSKNTAYLQMNSLKPEDTAVYYCARQDSSSPYFDYWGQGTLVTVSS |
| 4A- | 2910 | EVQLVESGGGLVQPGGSLRLSCAASGFSFDDDYVMGWFRQAPGKEREFVAAISNSGLSTY |
| H112 | | YADSVKGRFTISADNSKNTAYLQMNSLKPEDTAVYYCAADRRGLASTRAADYDWGQGT |
| | | LVTVSS |
| 4A- | 2911 | EVQLVESGGGLVQPGGSLRLSCAASGSISSINVMGWFRQAPGKEREFVATMRWSTGSTYY |
| H113 | | ADSVKGRFTISADNSKNTAYLQMNSLKPEDTAVYYCAQRVRGFFGPLRTTPSWYEWGQG |
| | | TLVTVSS |
| 4A- | 2912 | EVQLVESGGGLVQPGGSLRLSCAASGLTFILYRMGWFRQAPGKEREFVAAINNFGTTKYA |
| H114 | | DSVKGRFTISADNSKNTAYLQMNSLKPEDTAVYYCARTHYDFWSGYTSRTPNYFDYWGQ |
| | | GTLVTVSS |
| 4A- | 2913 | EVQLVESGGGLVQPGGSLRLSCAASGGTFSVYHMGWFRQAPGKEREPVAAISWSGGSTA |
| H115 | | YADSVKGRFTISADNSKNTAYLQMNSLKPEDTAVYYCAAVNTWTSPSFDSWGQGTLVTV |
| | | SS |
| 4A- | 2914 | EVQLVESGGGLVQPGGSLRLSCAASGRAFSTYGMGWFRQAPGKEREFVAGINWSGDTPY |
| H116 | | YADSVKGRFTISADNSKNTAYLQMNSLKPEDTAVYYCAREVGPPPGYFDLWGQGTLVTV |
| | | SS |
| 4A- | 2915 | EVQLVESGGGLVQPGGSLRLSCAASGRTFSDIAMGWFRQAPGKEREFVASINWGGGNTY |
| H117 | | YADSVKGRFTISADNSKNTAYLQMNSLKPEDTAVYYCAAKGIWDYLGRRDFGDWGQGT |
| | | LVTVSS |
| 4A- | 2916 | EVQLVESGGGLVQPGGSLRLSCAASGRTFSSARMGWFRQAPGKEREFVAAISWSGDNTH |
| H118 | | YADSVKGRFTISADNSKNTAYLQMNSLKPEDTAVYYCATTENPNPRWGQGTLVTVSS |
| 4A- | 2917 | EVQLVESGGGLVQPGGSLRLSCAASGFAFSSYAMGWFRQAPGKEREWVATINGDDYTYY |
| H119 | | ADSVKGRFTISADNSKNTAYLQMNSLKPEDTAVYYCVATPGGYGLWGQGTLVTVSS |
| 4A-H12 | 2918 | EVQLVESGGGLVQPGGSLRLSCAASGITFRRHDMGWFRQAPGKEREFVAAIRWSSSSTVY |
| | | ADSVKGRFTISADNSKNTAYLQMNSLKPEDTAVYYCAADRGVYGGRWYRTSQYTWGQG |
| | | TLVTVSS |
| 4A- | 2919 | EVQLVESGGGLVQPGGSLRLSCAASGTAASFNPMGWFRQAPGKEREFVAAITSGGSTNYA |
| H121 | | DSVKGRFTISADNSKNTAYLQMNSLKPEDTAVYYCAAIAYEEGVYRWDWGQGTLVTVSS |
| 4A- | 2920 | EVQLVESGGGLVQPGGSLRLSCAASGNINIINYMGWFRQAPGKEREGVAAIHWNGDSTAY |
| H122 | | ADSVKGRFTISADNSKNTAYLQMNSLKPEDTAVYYCASGPPYSNYFAYWGQGTLVTVSS |
| 4A- | 2921 | EVQLVESGGGLVQPGGSLRLSCAASGFTFDDYAMGWFRQAPGKERESVAAISGSGGSTAY |
| H123 | | ADSVKGRFTISADNSKNTAYLQMNSLKPEDTAVYYCAKIMGSGRPYFDHWGQGTLVTVS |
| | | S |
| 4A- | 2922 | EVQLVESGGGLVQPGGSLRLSCAASGNIFTRNVMGWFRQAPGKEREFVAAITSSGSTNYA |
| H124 | | DSVKGRFTISADNSKNTAYLQMNSLKPEDTAVYYCARPSSDLQGGVDYWGQGTLVTVSS |
| 4A- | 2923 | EVQLVESGGGLVQPGGSLRLSCAASGRTFSSIAMGWFRQAPGKEREFVASINWGGGNTIY |
| H125 | | ADSVKGRFTISADNSKNTAYLQMNSLKPEDTAVYYCAAKGIWDYLGRRDFGDWGQGTL |
| | | VTVSS |
| 4A- | 2924 | EVQLVESGGGLVQPGGSLRLSCAASGIPSTLRAMGWFRQAPGKEREFVAAVSSLGPFTRY |
| H126 | | ADSVKGRFTISADNSKNTAYLQMNSLKPEDTAVYYCAAKPGWVARDPSEYNWGQGTLV |
| | | TVSS |
| 4A- | 2925 | EVQLVESGGGLVQPGGSLRLSCAASGFTLDDSAMGWFRQAPGKEREWVAAITNGGSTYY |
| H127 | | ADSVKGRFTISADNSKNTAYLQMNSLKPEDTAVYYCARFARGSPYFDFWGQGTLVTVSS |
| 4A- | 2926 | EVQLVESGGGLVQPGGSLRLSCAASGSISSFNAMGWFRQAPGKERESVAAIDWDGSTAYA |
| H128 | | DSVKGRFTISADNSKNTAYLQMNSLKPEDTAVYYCARGGGYYGSGSFEYWGQGTLVTVS |
| | | S |
| 4A- | 2927 | EVQLVESGGGLVQPGGSLRLSCAASGNIFSDNIIGWFRQAPGKEREMVAYYTSGGSIDYAD |
| H129 | | SVKGRFTISADNSKNTAYLQMNSLKPEDTAVYYCARGTAVGRPPPGGMDVWGQGTLVT |
| | | VSS |
| 4A-H13 | 2928 | EVQLVESGGGLVQPGGSLRLSCAASGSISSIGAMGWFRQAPGKEREGVAAISSSGSSTVYA |
| | | DSVKGRFTISADNSKNTAYLQMNSLKPEDTAVYYCARVPPGQAYFDSWGQGTLVTVSS |
| 4A- | 2929 | EVQLVESGGGLVQPGGSLRLSCAASGFTFDDYGMGWFRQAPGKERELVATITWSGDSTY |
| H131 | | YADSVKGRFTISADNSKNTAYLQMNSLKPEDTAVYYCAKGGSWYYDSSGYYGRWGQGT |
| | | LVTVSS |
| 4A- | 2930 | EVQLVESGGGLVQPGGSLRLSCAASGRTFSNYTMGWFRQAPGKEREWVSAISWSTGSTY |
| H132 | | YADSVKGRFTISADNSKNTAYLQMNSLKPEDTAVYYCAADRYGPPWYDWGQGTLVTVS |
| | | S |
| 4A- | 2931 | EVQLVESGGGLVQPGGSLRLSCAASGGTFSSVGMGWFRQAPGKERELVAVINWSGARTY |
| H134 | | YADSVKGRFTISADNSKNTAYLQMNSLKPEDTAVYYCAVPWMDYNRRDWGQGTLVTVS |
| | | S |
| 4A- | 2932 | EVQLVESGGGLVQPGGSLRLSCAASGRIFTNTAMGWFRQAPGKEREGVAAINWSGGSTA |
| H135 | | YADSVKGRFTISADNSKNTAYLQMNSLKPEDTAVYYCARTSGSYSFDYWGQGTLVTVSS |
| 4A- | 2933 | EVQLVESGGGLVQPGGSLRLSCAASGEEFSDHWMGWFRQAPGKEREFVGAIHWSGGRTY |
| H136 | | YADSVKGRFTISADNSKNTAYLQMNSLKPEDTAVYYCAADRRGLASTRAADYDWGQGT |
| | | LVTVSS |
| 4A- | 2934 | EVQLVESGGGLVQPGGSLRLSCAASGRTFSSIAMGWFRQAPGKEREFVAAINWSGARTAY |
| H137 | | ADSVKGRFTISADNSKNTAYLQMNSLKPEDTAVYYCAAKGIWDYLGRRDFGDWGQGTL |
| | | VTVSS |
| 4A- | 2935 | EVQLVESGGGLVQPGGSLRLSCAASGSTSSLRTMGWFRQAPGKEREGVAAISSRDGSTIYA |
| H138 | | DSVKGRFTISADNSKNTAYLQMNSLKPEDTAVYYCARDDSSSPYFDYWGQGTLVTVSS |
| 4A- | 2936 | EVQLVESGGGLVQPGGSLRLSCAASGGGTFGSYAMGWFRQAPGKEREFVAAISIASGASG |
| H139 | | GTTNYADSVKGRFTISADNSKNTAYLQMNSLKPEDTAVYYCATTMNPNPRWGQGTLVTV |
| | | SS |
| 4A-H14 | 2937 | EVQLVESGGGLVQPGGSLRLSCAASGRTFSNAAMGWFRQAPGKEREFVARITWNGGSTF |
| | | YADSVKGRFTISADNSKNTAYLQMNSLKPEDTAVYYCATTENPNPRWGQGTLVTVSS |
| 4A- | 2938 | EVQLVESGGGLVQPGGSLRLSCAASGIILSDNAMGWFRQAPGKEREFVAAISWLGESTYY |
| H141 | | ADSVKGRFTISADNSKNTAYLQMNSLKPEDTAVYYCAADRRGLASTRAADYDWGQGTL |
| | | VTVSS |
| 4A- | 2939 | EVQLVESGGGLVQPGGSLRLSCAASGRTFGDYIMGWFRQAPGKERESVAAINWNGGYTA |
| H142 | | YADSVKGRFTISADNSKNTAYLQMNSLKPEDTAVYYCATTSPNTGWHYYRWGQGTLVT |
| | | VSS |
| 4A- | 2940 | EVQLVESGGGLVQPGGSLRLSCAASGFNFNWYPMGWFRQAPGKERESVAAISWTGVSTY |
| H143 | | TAYADSVKGRFTISADNSKNTAYLQMNSLKPEDTAVYYCARWGPGPAGGSPGLVGFDY |
| | | WGQGTLVTVSS |
| 4A- | 2941 | EVQLVESGGGLVQPGGSLRLSCAASGSIRSVSVMGWFRQAPGKEREAVAAISWSGVGTA |
| H144 | | YADSVKGRFTISADNSKNTAYLQMNSLKPEDTAVYYCAAYQRGWGDWGQGTLVTVSS |
| 4A- | 2942 | EVQLVESGGGLVQPGGSLRLSCAASGMTFRLYAMGWFRQAPGKEREFVGAINWLSESTY |
| H145 | | YADSVKGRFTISADNSKNTAYLQMNSLKPEDTAVYYCAAKPGWVARDPSEYNWGQGTL |
| | | VTVSS |
| 4A- | 2943 | EVQLVESGGGLVQPGGSLRLSCAASGRTFSDDAMGWFRQAPGKEREFVAAINWSGGSTY |
| H146 | | YADSVKGRFTISADNSKNTAYLQMNSLKPEDTAVYYCATDPPLFWGQGTMVTVSS |
| 4A- | 2944 | EVQLVESGGGLVQPGGSLRLSCAASGGTFSVYAMGWFRQAPGKEREGVAAISMSGDDAA |
| H147 | | YADSVKGRFTISADNSKNTAYLQMNSLKPEDTAVYYCAKISKDDGGKPRGAFFDSWGQG |
| | | TLVTVSS |
| 4A- | 2945 | EVQLVESGGGLVQPGGSLRLSCAASGFALGYYAMGWFRQAPGKERESVAAISSRDGSTA |
| H148 | | YADSVKGRFTISADNSKNTAYLQMNSLKPEDTAVYYCARLATGPQAYFHHWGQGTLVT |
| | | VSS |
| 4A- | 2946 | EVQLVESGGGLVQPGGSLRLSCAASGFNLDDYAMGWFRQAPGKERESVAAISWDGGATA |
| H149 | | YADSVKGRFTISADNSKNTAYLQMNSLKPEDTAVYYCARVGRGTTAFDSWGQGTLVTVS |
| | | S |
| 4A-H15 | 2947 | EVQLVESGGGLVQPGGSLRLSCAASGNTFSGGFMGWFRQAPGKEREFVASIRSGARTYYA |
| | | DSVKGRFTISADNSKNTAYLQMNSLKPEDTAVYYCAQRVRGFFGPLRTTPSWYEWGQGT |
| | | LVTVSS |
| 4A- | 2948 | EVQLVESGGGLVQPGGSLRLSCAASGSIRSINIMGWFRQAPGKEREAVAAISWSGGSTVYA |
| H151 | | DSVKGRFTISADNSKNTAYLQMNSLKPEDTAVYYCASLLAGDRYFDYWGQGTLVTVSS |
| 7A-1 | 2949 | EVQLVESGGGLVQPGGSLRLSCAASGFTLGDYVMGWFRQAPGKEREFVAAIHSGGSTYA |
| | | DSVKGRFTISADNSKNTAYLQMNSLKPEDTAVYYCAAKEYGGTRRYDRAYNWGQGTLV |
| | | TVSS |
| 7A-2 | 2950 | EVQLVESGGGLVQPGGSLRLSCAASGGGTFGSYAMGWFRQAPGKERELVAAISSGGSTN |
| | | YADSVKGRFTISADNSKNTAYLQMNSLKPEDTAVYYCARGDWRYGWGQGTLVTVSS |
| 7A-3 | 2951 | EVQLVESGGGLVQPGGSLRLSCAASGRTYSISAMGWFRQAPGKEREFVAAISMSGDDSAY |
| | | ADSVKGRFTISADNSKNTAYLQMNSLKPEDTAVYYCAAQLGYESGYSLTYDYDWGQGTL |
| | | VTVSS |
| 7A-4 | 2952 | EVQLVESGGGLVQPGGSLRLSCAASGGTFSTYPMGWFRQAPGKEREFVAAITSDGSTLYA |
| | | DSVKGRFTISADNSKNTAYLQMNSLKPEDTAVYYCAATDYNKAYAREGRRYDWGQGTL |
| | | VTVSS |
| 7A-5 | 2953 | EVQLVESGGGLVQPGGSLRLSCAASGSIFRINAMGWFRQAPGKEREFVAAIHWSGSSTRY |
| | | ADSVKGRFTISADNSKNTAYLQMNSLKPEDTAVYYCAAQDRRRGDYYTFDYHWGQGTL |
| | | VTVSS |
| 7A-6 | 2954 | EVQLVESGGGLVQPGGSLRLSCAASGGTFNNYAMGWFRQAPGKERELVAAITSGGSTDY |
| | | ADSVKGRFTISADNSKNTAYLQMNSLKPEDTAVYYCARGDWRYGWGQGTLVTVSS |
| 7A-7 | 2955 | EVQLVESGGGLVQPGGSLRLSCAASGTIVNINVMGWFRQAPGKEREFVAAIHWSGGLKA |
| | | YADSVKGRFTISADNSKNTAYLQMNSLKPEDTAVYYCAMNRAGIYEWGQGTLVTVSS |
| 7A-8 | 2956 | EVQLVESGGGLVQPGGSLRLSCAASGSTFSNYAMGWFRQAPGKERELVAAITSGGSTSYA |
| | | DSVKGRFTISADNSKNTAYLQMNSLKPEDTAVYYCARGDWRYGWGQGTLVTVSS |
| 7A-9 | 2957 | EVQLVESGGGLVQPGGSLRLSCAASGFSFDDYVMGWFRQAPGKEREFVAAISRSGNLKSY |
| | | ADSVKGRFTISADNSKNTAYLQMNSLKPEDTAVYYCAAKEYGGTRRYDRAYNWGQGTL |
| | | VTVSS |
| 7A-10 | 2958 | EVQLVESGGGLVQPGGSLRLSCAASGSAFRSTVMGWFRQAPGKEREFVAAVIGSSGITDY |
| | | ADSVKGRFTISADNSKNTAYLQMNSLKPEDTAVYYCARGDWRYGWGQGTLVTVSS |
| 7A-11 | 2959 | EVQLVESGGGLVQPGGSLRLSCAASGRTFSDAGMGWFRQAPGKEREFVAAISRSGNLKA |
| | | YADSVKGRFTISADNSKNTAYLQMNSLKPEDTAVYYCAVQVNGTWAWGQGTLVTVSS |
| 7A-12 | 2960 | EVQLVESGGGLVQPGGSLRLSCAASGFTLDYYAMGWFRQAPGKERELVAAISWNGGSTS |
| | | YADSVKGRFTISADNSKNTAYLQMNSLKPEDTAVYYCARGDWRYGWGQGTLVTVSS |
| 7A-13 | 2961 | EVQLVESGGGLVQPGGSLRLSCAASGGTFSTYVMGWFRQAPGKEREFVAAISWSGESTLY |
| | | ADSVKGRFTISADNSKNTAYLQMNSLKPEDTAVYYCAADLMYGVDRRYDWGQGTLVTV |
| | | SS |
| 7A-14 | 2962 | EVQLVESGGGLVQPGGSLRLSCAASGISSSKRNMGWFRQAPGKEREFVAGISWTGGITYY |
| | | ADSVKGRFTISADNSKNTAYLQMNSLKPEDTAVYYCAIAGRGRWGQGTLVTVSS |
| 7A-15 | 2963 | EVQLVESGGGLVQPGGSLRLSCAASGRRFSAYGMGWFRQAPGKEREFVAVISRSGTLTRY |
| | | ADSVKGRFTISADNSKNTAYLQMNSLKPEDTAVYYCASSGPADARNGERWHWGQGTLV |
| | | TVSS |
| 7A-16 | 2964 | EVQLVESGGGLVQPGGSLRLSCAASGLTFSSFVMGWFRQAPGKEREFVAAISSNGGSTRY |
| | | ADSVKGRFTISADNSKNTAYLQMNSLKPEDTAVYYCAAKEYGGTRRYDRAYNWGQGTL |
| | | VTVSS |
| 7A-17 | 2965 | EVQLVESGGGLVQPGGSLRLSCAASGTVFSISAMGWFRQAPGKEREFVAAISMSGDDTAY |
| | | ADSVKGRFTISADNSKNTAYLQMNSLKPEDTAVYYCAAQLGYESGYSLTYDYDWGQGTL |
| | | VTVSS |
| 7A-18 | 2966 | EVQLVESGGGLVQPGGSLRLSCAASGSIFSPNVMGWFRQAPGKEREFVAAITNGGSTKYA |
| | | DSVKGRFTISADNSKNTAYLQMNSLKPEDTAVYYCAAQRWRGGSYEWGQGTLVTVSS |
| 7A-19 | 2967 | EVQLVESGGGLVQPGGSLRLSCAASGIPASIRVMGWFRQAPGKEREFVAAIHWSGSSTRY |
| | | ADSVKGRFTISADNSKNTAYLQMNSLKPEDTAVYYCALSRAIVPGDSEYDYRWGQGTLV |
| | | TVSS |
| 7A-20 | 2968 | EVQLVESGGGLVQPGGSLRLSCAASGRTFSMSAMGWFRQAPGKEREFVSAISWSGGSTLY |
| | | ADSVKGRFTISADNSKNTAYLQMNSLKPEDTAVYYCAAQLGYESGYSLTYDYDWGQGTL |
| | | VTVSS |
| 7A-21 | 2969 | EVQLVESGGGLVQPGGSLRLSCAASGRTFSNYAMGWFRQAPGKERELVAAITSGGSTDY |
| | | ADSVKGRFTISADNSKNTAYLQMNSLKPEDTAVYYCARGDWRYGWGQGTLVTVSS |
| 7A-22 | 2970 | EVQLVESGGGLVQPGGSLRLSCAASGRTFSSYAMGWFRQAPGKERELVAAISTGGSTYYA |
| | | DSVKGRFTISADNSKNTAYLQMNSLKPEDTAVYYCARGDWRYGWGQGTLVTVSS |
| 7A-23 | 2971 | EVQLVESGGGLVQPGGSLRLSCAASGRSFSSVGMGWFRQAPGKEREFVAVISRSGASTAY |
| | | ADSVKGRFTISADNSKNTAYLQMNSLKPEDTAVYYCASAGPADARNGERWAWGQGTLV |
| | | TVSS |
| 7A-24 | 2972 | EVQLVESGGGLVQPGGSLRLSCAASGRAFRRYTMGWFRQAPGKERELIAVINWSGDRRY |
| | | YADSVKGRFTISADNSKNTAYLQMNSLKPEDTAVYYCAATLAKGGGRWGQGTLVTVSS |
| 7A-25 | 2973 | EVQLVESGGGLVQPGGSLRLSCAAMAWAGFARRRAKNAKWWRALPRGGPTYADSVKG |
| | | RFTISADNSKNTAYLQMNSLKPEDTAVYYCAAGGMWYGSSLYVRFDLLEDGMDWGQGT |
| | | LVTVSS |
| 7A-26 | 2974 | EVQLVESGGGLVQPGGSLRLSCAASGSISSINGMGWFRQAPGKERELVALISRSGGTTYYA |
| | | DSVKGRFTISADNSKNTAYLQMNSLKPEDTAVYYCASAGPADARNGERWAWGQGTLVT |
| | | VSS |
| 7A-27 | 2975 | EVQLVESGGGLVQPGGSLRLSCAASGRTFSNNVMGWFRQAPGKERELVAAAISGGSTYY |
| | | ADSVKGRFTISADNSKNTAYLQMNSLKPEDTAVYYCARGDWRYGWGQGTLVTVSS |
| 7A-28 | 2976 | EVQLVESGGGLVQPGGSLRLSCAASGRTFSISAMGWFRQAPGKEREFVAAISRSGTTMYA |
| | | DSVKGRFTISADNSKNTAYLQMNSLKPEDTAVYYCAAQLGYESGYSLTYDYDWGQGTLV |
| | | TVSS |
| 7A-29 | 2977 | EVQLVESGGGLVQPGGSLRLSCAASGGTFSYYDLAAMGWFRQAPGKEREFVAAISWSQY |
| | | NTKYADSVKGRFTISADNSKNTAYLQMNSLKPEDTAVYYCAARVVVRTAHGFEDNWGQ |
| | | GTLVTVSS |
| 7A-30 | 2978 | EVQLVESGGGLVQPGGSLRLSCAASGRTFNNYGMGWFRQAPGKEREFVAVISRSGSLKA |
| | | YADSVKGRFTISADNSKNTAYLQMNSLKPEDTAVYYCASDPTYGSGRWTWGQGTLVTVS |
| | | S |
| 7A-31 | 2979 | EVQLVESGGGLVQPGGSLRLNCAASGFTLDDYVMGWFRQTPGKEREFVAAISSSGALTSY |
| | | ADSVKGRFTISADNSKNTAYLQMNSLKPEDAAVYYCAAKEYGGTRRYDRAYNWGQGTL |
| | | VTVSS |
| 7A-32 | 2980 | EVQLVESGGGLVQPGGSLRLSCAASGRTFNAMGWFRQAPGKEREFVAAIRWSGDMSVYA |
| | | DSVKGRFTISADNSKNTAYLQMNSLKPEDTAVYYCAAQDRRRGDYYTFDYHWGQGTLV |
| | | TVSS |
| 7A-33 | 2981 | EVQLVESGGGLVQPGGSLRLSCAASGLTFSTYAMGWFRQAPGKEREFVAAITSGGSTDYA |
| | | DSVKGRFTISADNSKNTAYLQMNSLKPEDTAVYYCARGDWRYGWGQGTLVTVSS |
| 7A-34 | 2982 | EVQLVESGGGLVQPGGSLRLSCAASGSIFTINAMGWFRQAPGKEREGVAAIGSDGSTSYA |
| | | DSVKGRFTISADNSKNTAYLQMNSLKPEDTAVYYCAVVRWGADWGQGTLVTVSS |
| 7A-35 | 2983 | EVQLVESGGGLVQPGGSLRLSCAASGLTFSSYAMGWFRQAPGKERELVAAITSSSGSTPA |
| | | YADSVKGRFTISADNSKNTAYLQMNSLKPEDTAVYYCARGDWRYGWGQGTLVTVSS |
| 7A-36 | 2984 | EVQLVESGGGLVQPGGSLRLSCAASGIPFSTRTMGWFRQAPGKEREFVAAISWSQYNTKY |
| | | ADSVKGRFTISADNSKNTAYLQMNSLKPEDTAVYYCAARHWGMFSRSENDYNWGQGTL |
| | | VTVSS |
| 7A-37 | 2985 | EVQLVESGGGLVQPGGSLRLSCAASGRSRFSTYVMGWFRQAPGKEREFVAAISWSQYNT |
| | | KYADSVKGRFTISADNSKNTAYLQMNSLKPEDTAVYYCAAGNGGRNYGHSRARYDWGQ |
| | | GTLVTVSS |
| 7A-38 | 2986 | EVQLVESGGGLVQPGGSLRLSCAASGLTLSSYGMGWFRQAPGKEREYVAVISRSGSLKAY |
| | | ADSVKGRFTISADNSKNTAYLQMNSLKPEDTAVYYCATRADAEGWWDWGQGTLVTVSS |
| 7A-39 | 2987 | EVQLVESGGGLVQPGGSLRLSCAASGSIFRVNVMGWFRQAPGKEREFVAAINNFGTTKYA |
| | | DSVKGRFTISADNSKNTAYLQMNSLKPEDTAVYYCAADLPSRWGQGTLVTVSS |
| 7A-40 | 2988 | EVQLVESGGGLVQPGGSLRLSCAASGRTFRNYAMGWFRQAPGKERELVAAISSGGSTDY |
| | | ADSVKGRFTISADNSKNTAYLQMNSLKPEDTAVYYCARGDWRYGWGQGTLVTVSS |
| 7A-41 | 2989 | EVQLVESGGGLVQPGGSLRLSCAASGRTFSSFAMGWFRQAPGKERELVAAISSGGSTNYA |
| | | DSVKGRFTISADNSKNTAYLQMNSLKPEDTAVYYCARGDWRYGWGQGTLVTVSS |
| 7A-42 | 2990 | EVQLVESGGGLVQPGGSLRLSCAASGTTFRINAMGWFRQAPGKEREFVAAMNWSGGSTK |
| | | YADSVKGRFTISADNSKNTAYLQMNSLKPEDTAVYYCAAQDRRRGDYYTFDYHWGQGT |
| | | LVTVSS |
| 7A-43 | 2991 | EVQLVESGGGLVQPGGSLRLSCAASGFTLGDYVMGWFRQAPGKEREFVAAIHSGGSTLY |
| | | ADSVKGRFTISADNSKNTAYLQMNSLKPEDTAVYYCAAKEYGGTRRYDRTYNWGQGTL |
| | | VTVSS |
| 7A-44 | 2992 | EVQLVESGGGLVQPGGSLRLSCAASGFTFSRSAMGWFRQAPGKERELVAGILSSGATVYA |
| | | DSVKGRFTISADNSKNTAYLQMNSLKPEDTAVYYCAKAPRDWGQGTLVTVSS |
| 7A-45 | 2993 | EVQLVESGGGLVQPGGSLRLSCAASGRTFNNYAMGWFRQAPGKERELVAAITSGGSTDY |
| | | ADSVKGRFTISADNSKNTAYLQMNSLKPEDTAVYYCARGDWRYGWGQGTLVTVSS |
| 7A-46 | 2994 | EVQLVESGGGLVQPGGSLRLSCAASGFTFRSYPMGWFRQAPGKEREFVAAINNFGTTKYA |
| | | DSVKGRFTISADNSKNTAYLQMNSLKPEDTAVYYCAAAKGIGVYGWGQGTLVTVSS |
| 7A-47 | 2995 | EVQLVESGGGLVQPGGSLRLSCAASGNIFTRNVMGWFRQAPGKEREFVAAIHWNGDSTK |
| | | YADSVKGRFTISADNSKNTAYLQMNSLKPEDTAVYYCAAGSNIGGSRWRYDWGQGTLV |
| | | TVSS |
| 7A-48 | 2996 | EVQLVESGGGLVQPGGSLRLSCAASGRTISRYTMGWFRQAPGKERELVAAIKWSGASTVY |
| | | ADSVKGRFTISADNSKNTAYLQMNSLKPEDTAVYYCAAKGIWDYLGRRDFGDWGQGTL |
| | | VTVSS |
| 7A-49 | 2997 | EVQLVESGGGLVQPGGSLRLSCAASGFRFSSYGMGWFRQAPGKEREFVAIITSGGLTVYA |
| | | DSVKGRFTISADNSKNTAYLQMNSLKPEDTAVYYCAARKTFYFGTSSYPNDYAWGQGTL |
| | | VTVSS |
| 7A-50 | 2998 | EVQLVESGGGLVQPGGSLRLSCAASGRTFDNHAMGWFRQAPGKEREGVAAIGSDGSTSY |
| | | ADSVKGRFTISADNSKNTAYLQMNSLKPEDTAVYYCAVVRWGVDWGQGTLVTVSS |
| 7A-51 | 2999 | EVQLVESGGGLVQPGGSLRLSCAASGFTFSSHAMGWFRQAPGKEREFVAGISWSGESTLT |
| | | RYADSVKGRFTISADNSKNTAYLQMNSLKPEDTAVYYCADVNGDWGQGTLVTVSS |
| 7A-52 | 3000 | EVQLVESGGGLVQPGGSLRLSCAASGMTFRLYAMGWFRQAPGKEREFVAAISWSQYNTK |
| | | YADSVKGRFTISADNSKNTAYLQMNSLKPEDTAVYYCAAQLGYESGYSLTYDYDWGQG |
| | | TLVTVSS |
| 7A-53 | 3001 | EVQLVESGGGLVQPGGSLRLSCAASGGTFRKLAMGWFRQAPGKEREFVAVISWTGGSSY |
| | | YADSVKGRFTISADNSKNTAYLQMNSLKPEDTAVYYCARLTSFATWGQGTLVTVSS |
| 7A-54 | 3002 | EVQLVESGGGLVQPGGSLRLSCAASGRTFSANGMGWFRQAPGKEREFVAAISASGTLRAY |
| | | ADSVKGRFTISADNSKNTAYLQMNSLKPEDTAVYYCAARSPMSPTWDWGQGTLVTVSS |
| 7A-55 | 3003 | EVQLVESGGGLVQPGGSLRLSCAASGSAFRSTVMGWFRQAPGKEREFVAAISWTGESTLY |
| | | ADSVKGRFTISADNSKNTAYLQMNSLKPEDTAVYYCATGPYRSYFARSYLWGQGTLVTV |
| | | SS |
| 7A-56 | 3004 | EVQLVESGGGLVQPGGSLRLSCAASGGTFDYSGMGWFRQAPGKEREFVAVVSQSGRTTY |
| | | YADSVKGLFTITADNSKNTAYLQMNLLKPEDTAVYYCPTATRPGEWDGGQGTLVTVSR |
| 7A-57 | 3005 | EVQLVESGGGLVQPGGSLRLSCAASGVFGPIRAMGWFRQAPGKERELVALMGNDGSTYA |
| | | DSVKGRFTISADNSKNTAYLQMNSLKPEDTAVYYCAAIGWRWGQGTLVTVSS |
| 7A-58 | 3006 | EVQLVESGGGLVQPGGSLRLSCAASGFNFNWYPMGWFRQAPGKEREFVAAIRWSGGITY |
| | | YADSVKGRFTISADNSKNTAYLQMNSLKPEDTAVYYCATGPYRSYFARSYLWGQGTLVT |
| | | VSS |
| 7A-59 | 3007 | EVQLVESGGGLVQPGGSLRLSCAASGMTFHRYVMGWFRQAPGKERELVASITTGGTPNY |
| | | ADSVKGRFTIITDNNKNTAYLLMINLQPEDTAVYYCCKVPYIWGQGTLGTVGT |
| 7A-60 | 3008 | EVQLVESGGGLVQPGGSLRLSCAASGISTMGWFRQAPGKEREFVAAINNFGTTKYADSVK |
| | | GRFTISADNSKNTAYLQMNSLKPEDTAVYYCAAASQSGSGYDWGQGTLVTVSS |
| 7A-61 | 3009 | EVQLVESGGGLVQPGGSLRLSCAASGRAFNTRAMGWFRQAPGKERELVALMGNDGSTY |
| | | ADSVKGRFTISADNSKNTAYLQMNSLKPEDTAVYYCAAIGWRWGQGTLVTVSS |
| 7A-62 | 3010 | EVOLVESGGGLVOPGGSLRLSCAASGLTDRRYTMGWFRQAPGKEREFVAAINSGGSTLY |
| | | ADSVKGRFTISADNSKNTAYLQMNSLKPEDTAVYYCAAGNGGRTYGHSRARYEWGQGT |
| | | LVTVSS |
| 7A-63 | 3011 | EVQLVESGGGLVQPGGSLRLSCAASGRTFNVMGWFRQAPGKERELVALMGNDGSTYAD |
| | | SVKGRFTISADNSKNTAYLQMNSLKPEDTAVYYCAAVRWGVDWGQGTLVTVSS |
| 7A-64 | 3012 | EVQLVESGGGLVQPGGSLRLSCAASGRAFNTRAMGWFRQAPGKERELVALMGNDGSTN |
| | | YADSVKGRFTISADNSKNTAYLQMNSLKPEDTAVYYCAAIGWRWGQGTLVTVSS |
| 7A-65 | 3013 | EVQVVESGGGVVHPGGSVRMRCAASGVTVDYSGMGWFGQAPGKEREFVAVVSQSARTT |
| | | YYADSVKGRFTISADNSKNTEYLQMNSMKPEDTAVYYCATATRPGEWDWGQGTLVTVS |
| | | S |
| 7A-66 | 3014 | EVQLVESGGGLVQPGGSLRLSCAASGRTPRLGAMGWFRQAPGKEREFVAAISRSGGLTSY |
| | | ADSVKGRFTISADNSKNTAYLQMNSLKPEDTAVYYCAAQLVGSNIGGSRWRYDWGQGT |
| | | LVTVSS |
| 7A-67 | 3015 | EVQLVESGGGLVQPGGSLRLSCAASGLTFRNYAMGWFRQAPGKEREFVAAITSGGSTLYA |
| | | DSVKGRFTISADNSKNTAYLQMNSLKPEDTAVYYCARGDWRYGWGHGTLVTESS |
| 8A-1 | 3016 | EVQLVESGGGLVQPGGSLRLSCAASGGRTFSDLAMGWFRQAPGKEREFVALITRSGGTTF |
| | | YADSVKGRFTISADNSKNTAYLQMNSLKPEDTAVYYCAIGRGSWGQGTLVTVSS |
| 8A-2 | 3017 | EVQLVESGGGLVQPGGSLRLSCAASGFTFGEYAMGWFRQAPGKEREFVAAVSSLGPFTRY |
| | | ADSVKGRFTISADNSKNTAYLQMNSLKPEDTAVYYCAAVLDGYSGSWGQGTLVTVSS |
| 8A-3 | 3018 | EVQLVESGGGLVQPGGSLRLSCAASGFAFSSYGMGWFRQAPGKEREFVAAISWSGVRSG |
| | | VSAIYADSVKGRFTISADNSKNTAYLQMNSLKPEDTAVYYCTTDLTGDLWYFDLWGQGT |
| | | LVTVSS |
| 8A-4 | 3019 | EVQLVESGGGLVQPGGSLRLSCAASGLTAGTYAMCWFRQAPGKEREGVACASSTDGSTA |
| | | YADSVKGRFTISADNSKNTAYLQMNSLKPEDTAVYYCAAVRTYGSATYDWGQGTLVTV |
| | | SS |
| 8A-5 | 3020 | EVQLVESGGGLVQPGGSLRLSCAASGFTLDDYVMGWFRQAPGKERELVAAVSSLGPFTR |
| | | YADSVKGRFTISADNSKNTAYLQMNSLKPEDTAVYYCAAKEYGGTRRYDRAYNWGQGT |
| | | LVTVSS |
| 8A-6 | 3021 | EVQLVESGGGLVQPGGSLRLSCAASGPTLGSYVMGWFRQAPGKEREFVAAISWSQYNTK |
| | | YADSVKGRFTISADNSKNTAYLQMNSLKPEDTAVYYCAAQRWRGGSYEWGQGTLVTVS |
| | | S |
| 8A-7 | 3022 | EVQLVESGGGLVQPGGSLRLSCAASGPTFSSYVMGWFRQAPGKEREFVAAISWSQYNTK |
| | | YADSVKGRFTISADNSKNTAYLQMNSLKPEDTAVYYCAAASRSGSGYDWGQGTLVTVSS |
| 8A-8 | 3023 | EVQLVESGGGLVQPGGSLRLSCAASGYLYSKDCMGWFRQAPGKEREGVATICTGDGSTA |
| | | YADSVKGRFTISADNSKNTAYLQMNSLKPEDTAVYYCAVIAYEEGVYRWDWGQGTLVT |
| | | VSS |
| 8A-9 | 3024 | EVQLVESGGGLVQPGGSLRLSCAASGFTIDDYAMGWFRQAPGKEREGVAAISGSGDDTY |
| | | YADSVKGRFTISADNSKNTAYLQMNSLKPEDTAVYYCAKLPYVSGDYWGQGTLVTVSS |
| 8A-10 | 3025 | EVQLVESGGGLVQPGGSLRLSCAASGGRFSDYGMGWFRQAPGKERELVALISRSGNLKSY |
| | | ADSVKGRFTISADNSKNTAYLQMNSLKPEDTAVYYCAAKTGTSFVWGQGTLVTVSS |
| 8A-11 | 3026 | DSVKGRFTISADNSKNTAYLQMNSLKPEDTAVYYCARGDWRYGWGQGTLVTVSS |
| 8A-12 | 3027 | EVQLVESGGGLVQPGGSLRLSCAASGIPSTLRAMGWFRQAPGKEREFVALINRSGGSQFY |
| | | ADSVKGRFTISADNSKNTAYLQMNSLKPEDTAVYYCAIGRGSWGQGTLVTVSS |
| 9A-1 | 3028 | EVQLVESGGGLVQPGGSLRLSCAASGRTFSRLAMGWFRQAPGKEREFVAAISRSGRSTSY |
| | | ADSVKGRFTISADNSKNTAYLQMNSLKPEDTAVYYCAARRSQILFTSRTDYEWGQGTLVT |
| | | VSS |
| 9A-2 | 3029 | EVQLVESGGGLVQPGGSLRLSCAASGSFSIAAMGWFRQAPGKEREFVATINYSGGGTYYA |
| | | DSVKGRFTISADNSKNTAYLQMNSLKPEDTAVYYCAAVNTFDESAYAAFACYDVVWGQ |
| | | GTLVTVSS |
| 9A-3 | 3030 | EVQLVESGGGLVQPGGSLRLSCAASGRTFSRYAMGWFRQAPGKEREFVAAISRSGKSTYY |
| | | ADSVKGRFTISADNSKNTAYLQMNSLKPEDTAVYYCAASSVFSDLRYRKNPKWGQGTLV |
| | | TVSS |
| 9A-4 | 3031 | EVQLVESGGGLVQPGGSLRLSCAASGRTFSKYAMGWFRQAPGKEREFVSHISRDGGRTFS |
| | | SSTMGWFRQAPGKERELVALITPSSRTTYYADSVKGRFTISADNSKNTAYLQMNSLKPED |
| | | TAVYYCAIAGRGRWGQGTLVTVSS |
| 9A-5 | 3032 | EVQLVESGGGLVQPGGSLRLSCAASGRTFRRYAMGWFRQAPGKEREFVASINWGGGNTY |
| | | YADSVKGRFTISADNSKNTAYLQMNSLKPEDTAVYYCAKTKRTGIFTTARMVDWGQGTL |
| | | VTVSS |
| 9A-6 | 3033 | EVQLVESGGGLVQPGGSLRLSCAASGRTFSRFAMGWFRQAPGKEREFVAAIRWSGGRTV |
| | | YADSVKGRFTISADNSKNTAYLQMNSLKPEDTAVYYCAIEPGTIRNWRNRVPFARGNFG |
| | | WGQGTLVTVSS |
| 9A-7 | 3034 | EVQLVESGGGLVQPGGSLRLSCAASGLGIAFSRRTAMGWFRQAPGKEREFVAAISWRGGN |
| | | TYYADSVKGRFTISADNSKNTAYLQMNSLKPEDTAVYYCAARRWIPPGPIWGQGTLVTVS |
| | | S |
| 9A-8 | 3035 | EVQLVESGGGLVQPGGSLRLSCAASGRTFRRYPMGWFRQAPGKEREFVAAISRSGGSTYY |
| | | ADSVKGRFTISADNSKNTAYLQMNSLKPEDTAVYYCAAKRLRSFASGGSYDWGQGTLVT |
| | | VSS |
| 9A-9 | 3036 | EVQLVESGGGLVQPGGSLRLSCAASGGTLRGYGMGWFRQAPGKEREFVASISRSGGSTYY |
| | | ADSVKGRFTISADNSKNTAYLQMNSLKPEDTAVYYCAARRRVTLFTSRADYDWGQGTLV |
| | | TVSS |
| 9A-10 | 3037 | EVQLVESGGGLVQPGGSLRLSCAASGRMFSSRSMGWFRQAPGKEREFVALINRSGGSQFY |
| | | ADSVKGRFTISADNSKNTAYLQMNSLKPEDTAVYYCAARRWIPPGPIWGQGTLVTVSS |
| 9A-11 | 3038 | EVQLVESGGGLVQPGGSLRLSCAASGRTFGRRAMGWFRQAPGKEREFVAGISRGGGTNY |
| | | ADSVKGRFTISADNSKNTAYLQMNSLKPEDTAVYYCAAKGIWDYLGRRDFGDWGQGTL |
| | | VTVSS |
| 10A-1 | 3039 | EVQLVESGGGLVQPGGSLRLSCAASGLSSPPFDDFPMGWFRQAPGKEREFVSSIYSDDGDS |
| | | MYADSVKGRFTISADNSKNTAYLQMNSLKPEDTAVYYCARQTFDFWSASLGGNFWYFDL |
| | | WGQGTLVTVSS |
| 10A-2 | 3040 | EVQLVESGGGLVQPGGSLRLSCAASGGTFSSYSMGWFRQAPGKEREFVSAISWIIGSGGTT |
| | | NYADSVKGRFTISADNSKNTAYLQMNSLKPEDTAVYYCTAGAGDSWGQGTLVTVSS |
| 10A-3 | 3041 | EVQLVESGGGLVQPGGSLRLSCAASGSIFSTRTMGWFRQAPGKEREFVASITKFGSTNYAD |
| | | SVKGRFTISADNSKNTAYLQMNSLKPEDTAVYYCTRGGGRFFDWLYLRWGQGTLVTVSS |
| 10A-4 | 3042 | EVQLVESGGGLVQPGGSLRLSCAASGRTLWRSNMGWFRQAPGKEREFVASISSFGSTKYA |
| | | DSVKGRFTISADNSKNTAYLQMNSLKPEDTAVYYCARGHGRYFDWLLFARPPDYWGQG |
| | | TLVTVSS |
| 10A-5 | 3043 | EVQLVESGGGLVQPGGSLRLSCAASGRSLGIYRMGWFRQAPGKEREFVAAITSGGRKNYA |
| | | DSVKGRFTISADNSKNTAYLQMNSLKPEDTAVYYCAKRTIFGVGRWLDPWGQGTLVTVS |
| | | S |
| 10A-6 | 3044 | EVQLVESGGGLVQPGGSLRLSCAASGTTLTFRIMGWFRQAPGKEREFVPAISSTGLASYTD |
| | | SVKGRFTISADNSKNTAYLQMNSLKPEDTAVYYCSKDRAPNCFACCPNGFDVWGQGTLV |
| | | TVSS |
| 10A-7 | 3045 | EVQLVESGGGLVQPGGSLRLSCAASGSRFSGRFNILNMGWFRQAPGKEREFVARIGYSGQ |
| | | SISYADSVKGRFTISADNSKNTAYLQMNSLKPEDTAVYYCARGRFLGGTEWGQGTLVTVS |
| | | S |
| 10A-8 | 3046 | EVQLVESGGGLVQPGGSLRLSCAASGTLFKINAMGWFRQAPGKEREFVAQINRHGVTYY |
| | | ADSVKGRFTISADNSKNTAYLQMNSLKPEDTAVYYCARGRTIFFGGGRYFDYWGQGTLV |
| | | TVSS |
| 10A-9 | 3047 | EVQLVESGGGLVQPGGSLRLSCAASGIPFRSRTMGWFRQAPGKEREFVAGITGSGRSQYY |
| | | ADSVKGRFTISADNSKNTAYLQMNSLKPEDTAVYYCARGARIFGSVAPWRGGNYYGMD |
| | | VWGQGTLVTVSS |
| 10A-10 | 3048 | EVQLVESGGGLVQPGGSLRLSCAASGFTFSSFRMGWFRQAPGKEREFVAGISRGGSTKYA |
| | | DSVKGRFTISADNSKNTAYLQMNSLKPEDTAVYYCARASGLWFRRPHVWGQGTLVTVSS |
| 10A-11 | 3049 | EVQLVESGGGLVQPGGSLRLSCAASGRNFRRNSMGWFRQAPGKEREFVAGISWSGARTH |
| | | YADSVKGRFTISADNSKNTAYLQMNSLKPEDTAVYYCARVSRRPRSPPGYYYGMDVWG |
| | | QGTLVTVSS |
| 10A-12 | 3050 | EVQLVESGGGLVQPGGSLRLSCAASGRNLRMYRMGWFRQAPGKEREFVATIRWSDGSTY |
| | | YADSVKGRFTISADNSKNTAYLQMNSLKPEDTAVYYCTRARLRYFDWLFPTNFDYWGQG |
| | | TLVTVSS |
| 10A-13 | 3051 | EVQLVESGGGLVQPGGSLRLSCAASGGLTFSSNTMGWFRQAPGKEREFVASISSSGRTSYA |
| | | DSVKGRFTISADNSKNTAYLQMNSLKPEDTAVYYCARRVRRLWFRSYFDLWGQGTLVTV |
| | | SS |
| 10A-14 | 3052 | EVQLVESGGGLVQPGGSLRLSCAASGFTLAYYAMGWFRQAPGKEREFVAAISWSGRNIN |
| | | YADSVKGRFTISADNSKNTAYLQMNSLKPEDTAVYYCARERARWFGKFSVSWGQGTLVT |
| | | VSS |
| 10A-15 | 3053 | EVQLVESGGGLVQPGGSLRLSCAASGRTFSSFPMGWFRQAPGKEREFVAAISWSGSTSYA |
| | | DSVKGRFTISADNSKNTAYLQMNSLKPEDTAVYYSACGRLGFGAWGQGTLVTVSS |
| 10A-16 | 3054 | EVQLVESGGGLVQPGGSLRLSCAASGISSSKRNMGWFRQAPGKEREFVATWTSRGITTYA |
| | | DSVKGRFTISADNSKNTAYLQMNSLKPEDTAVYYCARGGPPRLWGSYRRKYFDYWGQG |
| | | TLVTVSS |
| 10A-17 | 3055 | EVQLVESGGGLVQPGGSLRLSCAASGRTFSIYAMGWFRQAPGKEREFVARITRGGITKYA |
| | | DSVKGRFTISADNSKNTAYLQMNSLKPEDTAVYYCARGLGWLLGYYWGQGTLVTVSS |
| 10A-18 | 3056 | EVQLVESGGGLVQPGGSLRLSCAASGRMYNSYSMGWFRQAPGKEREFVARISPGGTFYA |
| | | DSVKGRFTISADNSKNTAYLQMNSLKPEDTAVYYCTTSARSGWFWRYFDSWGQGTLVTV |
| | | SS |
| 10A-19 | 3057 | EVQLVESGGGLVQPGGSLRLSCAASGRTFRSYGMGWFRQAPGKEREFVASISRSGTTMYA |
| | | DSVKGRFTISADNSKNTAYLQMNSLKPEDTAVYYCARRGLLQWFGAPNSWFDPWGQGT |
| | | LVTVSS |
| 10A-20 | 3058 | EVQLVESGGGLVQPGGSLRLSCAASGRTIRTMGWFRQAPGKEREFVATINSRGITNYADS |
| | | VKGRFTISADNSKNTAYLQMNSLKPEDTAVYYCTTERDGLLWFRELFRPSWGQGTLVTVS |
| | | S |
| 10A-21 | 3059 | EVQLVESGGGLVQPGGSLRLSCAASGRSFSFNAMGWFRQAPGKEREFVARISRFGRTNYA |
| | | DSVKGRFTISADNSKNTAYLQMNSLKPEDTAVYYCAKVHSYVWGGHSDYWGQGTLVTV |
| | | SS |
| 10A-22 | 3060 | EVQLVESGGGLVQPGGSLRLSCAASGRTYYAMGWFRQAPGKEREFVGAIDWSGRRITYA |
| | | DSVKGRFTISADNSKNTAYLQMNSLKPEDTAVYYCARVRFSRLGGVIGRPIDSWGQGTLV |
| | | TVSS |
| 10A-23 | 3061 | EVQLVESGGGLVQPGGSLRLSCAASGRAFRRYTMGWFRQAPGKEREFVASITKFGSTNYA |
| | | DSVKGRFTISADNSKNTAYLQMNSLKPEDTAVYYCAKDRGVLWFGELWYWGQGTLVTV |
| | | SS |
| 10A-24 | 3062 | EVQLVESGGGLVQPGGSLRLSCAASGRTFSNYRMGWFRQAPGKEREFVASINRGGSTKYA |
| | | DSVKGRFTISADNSKNTAYLQMNSLKPEDTAVYYCASGKGGSATIFHLSRRPLYFDYWGQ |
| | | GTLVTVSS |
| 10A-25 | 3063 | EVQLVESGGGLVQPGGSLRLSCAASGITFSPYAMGWFRQAPGKEREFVATINWSGGYTVY |
| | | ADSVKGRFTISADNSKNTAYLQMNSLKPEDTAVYYCAKRKNRGPLWFGGGGWGYWGQ |
| | | GTLVTVSS |
| 10A-26 | 3064 | EVQLVESGGGLVQPGGSLRLSCAASGRTFSGFTMSSTWMGWFRQAPGKEREFVAGIITNG |
| | | STNYADSVKGRFTISADNSKNTAYLQMNSLKPEDTAVYYCARRVAYSSFWSGLRKHMDV |
| | | WGQGTLVTVSS |
| 10A-27 | 3065 | EVQLVESGGGLVQPGGSLRLSCAASGRTFRRYSMGWFRQAPGKEREFVASITPGGNTNYA |
| | | DSVKGRFTISADNSKNTAYLQMNSLKPEDTAVYYCASRRRWLTPYIFWGQGTLVTVSS |
| 10A-28 | 3066 | EVQLVESGGGLVQPGGSLRLSCAASGSIFSIGMGWFRQAPGKEREFVARIWWRSGATYYA |
| | | DSVKGRFTISADNSKNTAYLQMNSLKPEDTAVYYCAAISIFGRLKWGQGTLVTVSS |
| 10A-29 | 3067 | EVQLVESGGGLVQPGGSLRLSCAASGRTFTSYRMGWFRQAPGKEREFVAEISSSGGYTYY |
| | | ADSVKGRFTISADNSKNTAYLQMNSLKPEDTAVYYCARVGPLRFLAQRPRLRPDYWGQG |
| | | TLVTVSS |
| 10A-30 | 3068 | EVQLVESGGGLVQPGGSLRLSCAASGRTFSSFRFRAMGWFRQAPGKEREFVALIFSGGSTY |
| | | YADSVKGRFTISADNSKNTAYLQMNSLKPEDTAVYYCAREWGRWLQRGSYWGQGTLVT |
| | | VSS |
| 10A-31 | 3069 | EVQLVESGGGLVQPGGSLRLSCAASGRTFGSYGMGWFRQAPGKEREFVATISIGGRTYYA |
| | | DSVKGRFTISADNSKNTAYLQMNSLKPEDTAVYYCARGSGSGFMWYHGNNNYDRWRY |
| | | WGQGTLVTVSS |
| 10A-32 | 3070 | EVQLVESGGGLVQPGGSLRLSCAASGRTFRSYPMGWFRQAPGKEREFVASINRGGSTNYA |
| | | DSVKGRFTISADNSKNTAYLQMNSLKPEDTAVYYCARGRYDFWSGYYRWFDPWGQGTL |
| | | VTVSS |
| 10A-33 | 3071 | EVQLVESGGGLVQPGGSLRLSCAASGRTFSRSDMGWFRQAPGKEREFVAAISWSGGSTSY |
| | | ADSVKGRFTISADNSKNTAYLQMNSLKPEDTAVYYCATVPPPRRFLEWLPRRLTYIWGQG |
| | | TLVTVSS |
| 10A-34 | 3072 | EVQLVESGGGLVQPGGSLRLSCAASGRTFRRYTMGWFRQAPGKEREFVASMRGSRSYYA |
| | | DSVKGRFTISADNSKNTAYLQMNSLKPEDTAVYYCARMSGFPFLDYWGQGTLVTVSS |
| 10A-35 | 3073 | EVQLVESGGGLVQPGGSLRLSCAASGSIFRLSTMGWFRQAPGKEREFVASISSFGSTYYAD |
| | | SVKGRFTISADNSKNTAYLQMNSLKPEDTAVYYCARTRGIFLWFGESFDYWGQGTLVTVS |
| | | S |
| 10A-36 | 3074 | EVQLVESGGGLVQPGGSLRLSCAASGIAFRIRTMGWFRQAPGKEREFVASITSGGSTNYAD |
| | | SVKGRFTISADNSKNTAYLQMNSLKPEDTAVYYCARGGPRFGGFRGYFDPWGQGTLVTV |
| | | SS |
| 10A-37 | 3075 | EVQLVESGGGLVQPGGSLRLSCAASGFTFTSYRMGWFRQAPGKEREFVAGISRFFGTAYY |
| | | ADSVKGRFTISADNSKNTAYLQMNSLKPEDTAVYYCARVTRWFGGLDVWGQGTLVTVS |
| | | S |
| 10A-38 | 3076 | EVQLVESGGGLVQPGGSLRLSCAASGRTFSRYVMGWFRQAPGKEREFVASISRFGRTNYA |
| | | DSVKGRFTISADNSKNTAYLQMNSLKPEDTAVYYCARHHGLGILWWGTMDVWGQGTLV |
| | | TVSS |
| 10A-39 | 3077 | EVQLVESGGGLVQPGGSLRLSCAASGRTFSMGWFRQAPGKEREFVASISRFGRTNYADSV |
| | | KGRFTISADNSKNTAYLQMNSLKPEDTAVYYCAKRSTWLPQHFDSWGQGTLVTVSS |
| 10A-40 | 3078 | EVQLVESGGGLVQPGGSLRLSCAASGRTFSTYTMGWFRQAPGKEREFVARIWRSGGNTY |
| | | YADSVKGRFTISADNSKNTAYLQMNSLKPEDTAVYYCARGVRGVFRAYFDHWGQGTLV |
| | | TVSS |
| 10A-41 | 3079 | EVQLVESGGGLVQPGGSLRLSCAASGRNLRMYRMGWFRQAPGKEREFVALISRVGVTSY |
| | | ADSVKGRFTISADNSKNTAYLQMNSLKPEDTAVYYCARGTSFFNFWSGSLGRVGFDSWG |
| | | QGTLVTVSS |
| 10A-42 | 3080 | EVQLVESGGGLVQPGGSLRLSCAASGITIRTHAMGWFRQAPGKEREFVATISRSGGNTYY |
| | | ADSVKGRFTISADNSKNTAYLQMNSLKPEDTAVYYCTTAGVLRYFDWFRRPYWGQGTLV |
| | | TVSS |
| 10A-43 | 3081 | EVQLVESGGGLVQPGGSLRLSCAASGRTFRRYHMGWFRQAPGKEREFVAAITSGGRTNY |
| | | ADSVKGRFTISADNSKNTAYLQMNSLKPEDTAVYYCTTDGLRYFDWFPWASAFDIWGQG |
| | | TLVTVSS |
| 10A-44 | 3082 | EVQLVESGGGLVQPGGSLRLSCAASGRTFRRYTMGWFRQAPGKEREFVAVISWSGGSTK |
| | | YADSVKGRFTISADNSKNTAYLQMNSLKPEDTAVYYCARKGRWSGMNVWGQGTLVTVS |
| | | S |
| 10A-45 | 3083 | EVQLVESGGGLVQPGGSLRLSCAASGRTFSWYPMGWFRQAPGKEREFVASISWGGARTY |
| | | YADSVKGRFTISADNSKNTAYLQMNSLKPEDTAVYYCARSTGPRGSGRYRAHWFDSWG |
| | | QGTLVTVSS |
| 10A-46 | 3084 | EVQLVESGGGLVQPGGSLRLSCAASGRTFTSYRMGWFRQAPGKEREFVAAITWNSGRTR |
| | | YADSVKGRFTISADNSKNTAYLQMNSLKPEDTAVYYCSPSSWPFYFGAWGQGTLVTVSS |
| 10A-47 | 3085 | EVQLVESGGGLVQPGGSLRLSCAASGRPLRRYVMGWFRQAPGKEREFVAAITNGGSTKY |
| | | ADSVKGRFTISADNSKNTAYLQMNSLKPEDTAVYYCARGTPWRLLWFGTLGPPPAFDYW |
| | | GQGTLVTVSS |
| 10A-48 | 3086 | EVQLVESGGGLVQPGGSLRLSCAASGRTFRRYAMGWFRQAPGKEREFVAAINRSGSTEYA |
| | | DSVKGRFTISADNSKNTAYLQMNSLKPEDTAVYYCARQHQDFWTGYYTVWGQGTLVTV |
| | | SS |
| 10A-49 | 3087 | EVQLVESGGGLVQPGGSLRLSCAASGRTFRRYTMGWFRQAPGKEREFVASISRSGTTYYA |
| | | DSVKGRFTISADNSKNTAYLQMNSLKPEDTAVYYCAKEGWRWLQLRGGFDYWGQGTLV |
| | | TVSS |
| 10A-50 | 3088 | EVQLVESGGGLVQPGGSLRLSCAASGRTLSTYNMGWFRQAPGKEREFVASISRFGRTNYA |
| | | DSVKGRFTISADNSKNTAYLQMNSLKPEDTAVYYCARRGKLSAAMHWFDPWGQGTLVT |
| | | VSS |
| 10A-51 | 3089 | EVQLVESGGGLVQPGGSLRLSCAASGRFFSTRVMGWFRQAPGKEREFVARIWPGGSTYY |
| | | ADSVKGRFTISADNSKNTAYLQMNSLKPEDTAVYYCARDRGIFGVSRWGQGTLVTVSS |
| 10A-52 | 3090 | EVQLVESGGGLVQPGGSLRLSCAASGRFFSICSMGWFRQAPGKEREFVAGINWRSGGSTY |
| | | YADSVKGRFTISADNSKNTAYLQMNSLKPEDTAVYYCARGSGWWEYWGQGTLVTVSS |
| 10A-53 | 3091 | EVQLVESGGGLVQPGGSLRLSCAASGRMFSSRSNMGWFRQAPGKEREFVASISSGGTTAY |
| | | ADSVKGRFTISADNSKNTAYLQMNSLKPEDTAVYYCARGFGRRFLEWLPRFDYWGQGTL |
| | | VTVSS |
| 10A-54 | 3092 | EVQLVESGGGLVQPGGSLRLSCAASGRTFSSARMGWFRQAPGKEREFVAGINMISSTKYA |
| | | DSVKGRFTISADNSKNTAYLQMNSLKPEDTAVYYCAHFRRFLPRGYVDYWGQGTLVTVS |
| | | S |
| 10A-55 | 3093 | EVQLVESGGGLVQPGGSLRLSCAASGRTFRRYTMGWFRQAPGKEREFVARIAGGSTYYA |
| | | DSVKGRFTISADNSKNTAYLQMNSLKPEDTAVYYCARQQYYDFWSGYFRSGYFDLWGQ |
| | | GTLVTVSS |
| 10A-56 | 3094 | EVQLVESGGGLVQPGGSLRLSCAASGHTFRNYGMGWFRQAPGKEREFVAAITSSGSTNYA |
| | | DSVKGRFTISADNSKNTAYLQMNSLKPEDTAVYYCATVPPPRRFLEWLPRRLTYTWGQGT |
| | | LVTVSS |
| 10A-57 | 3095 | EVQLVESGGGLVQPGGSLRLSCAASGRTFSRYAMGWFRQAPGKEREFVASITKFGSTNYA |
| | | DSVKGRFTISADNSKNTAYLQMNSLKPEDTAVYYCAKERESRFLKWRKTDWGQGTLVTV |
| | | SS |
| 10A-58 | 3096 | EVQLVESGGGLVQPGGSLRLSCAASGRNLRMYRMGWFRQAPGKEREFVASISRFGRTNY |
| | | ADSVKGRFTISADNSKNTAYLQMNSLKPEDTAVYYCARHDSIGLFRHGMDVWGQGTLVT |
| | | VSS |
| 10A-59 | 3097 | EVQLVESGGGLVQPGGSLRLSCAASGRTFRRYAMGWFRQAPGKEREFVARISSGGSTSYA |
| | | DSVKGRFTISADNSKNTAYLQMNSLKPEDTAVYYCARDRGFGFWSGLRGYFDLWGQGTL |
| | | VTVSS |
| 10A-60 | 3098 | SVKGRFTISADNSKNTAYLQMNSLKPEDTAVYYCAKRKKRGPLWFGGGGWGYWGQGTL |
| | | VTVSS |
| 10A-61 | 3099 | EVQLVESGGGLVQPGGSLRLSCAASGIPFRSRTFSAYAMGWFRQAPGKEREFVAQITRGGS |
| | | TNYADSVKGRFTISADNSKNTAYLQMNSLKPEDTAVYYCARRHWFGFDYWGQGTLVTV |
| | | SS |

TABLE 16
Variable Domain Light Chain Sequences

| | SEQ | |
|---|---|---|
| Variant | ID NO | Sequence |
| 1-1 | 3100 | QSALTQPASVSGSPGQSITISCTGTSSDVGSNNLVSWYQQHPGKAPKLMIYEGDKRPSG |
| | | VSNRFSGSKSGNTASLTISGLQAEDEADYYCCSYATGFYVFGGGTKLTVL |
| 1-2 | 3101 | QSALTQPASVSGSPGQSITISCTGTSSVGGYNLVSWYQQHPGKAPKLMIYEGSKRPSGV |
| | | SNRFSGSKSGNTASLTISGLQAEDEADYYCCSYAGSYTLAVFGGGTKLTVL |
| 1-3 | 3102 | QSALTQPASVSGSPGQSITISCTGTSSNVGSYNLVSWYQQHPGKAPKLMIYEGTKRPSG |
| | | VSNRFSGSKSGNTASLTISGLQAEDEADYYCCSYAGSSTFKAYVFGGGTKLTVL |
| 1-4 | 3103 | QSALTQPASVSGSPGQSITISCTGTSSDVGGYNLVSWYQQHPGKAPKLMIYEGTKRPSG |
| | | VSNRFSGSKSGNTASLTISGLQAEDEADYYCCSYAGSSTHYVFGGGTKLTVL |
| 1-5 | 3104 | QSALTQPASVSGSPGQSITISCTGTSSDVGSYHLVSWYQQHPGKAPKLMIYEGTKRPSG |
| | | VSNRFSGSKSGNTASLTISGLQAEDEADYYCCSYAGSYTFGVVFGGGTKLTVL |
| 1-6 | 3105 | QSALTQPASVSGSPGQSITISCTGTSSDVGSNNLVSWYQQHPGKAPKLMIYEGGKRPSG |
| | | VSNRFSGSKSGNTASLTISGLQAEDEADYYCCSYSGRYTYVFGGGTKLTVL |
| 1-7 | 3106 | QSALTQPASVSGSPGQSITISCTGTSSDVGNYNLVSWYQQHPGKAPKLMIYEGTKRPSG |
| | | VSNRFSGSKSGNTASLTISGLQAEDEADYYCCSYAGSYTFAVFGGGTKLTVL |
| 1-8 | 3107 | QSALTQPASVSGSPGQSITISCTGTSSDIGSYNLVSWYQQHPGKAPKLMIYEASRPSGVS |
| | | NRFSGSKSGNTASLTISGLQAEDEADYYCCSYAGSGIFYVFGGGTKLTVL |
| 1-9 | 3108 | QSALTQPASVSGSPGQSITISCTGTGSDVGYNLVSWYQQHPGKAPKLMIYEVSKRPSGV |
| | | SNRFSGSKSGNTASLTISGLQAEDEADYYCCSYAGSSTFEVFGGGTKLTVL |
| 1-10 | 3109 | QSALTQPASVSGSPGQSITISCTGTSSDVGDYNLVSWYQQHPGKAPKLMIYEGGKRPSG |
| | | VSNRFSGSKSGNTASLTISGLQAEDEADYYCCSYAGSSTNVVFGGGTKLTVL |
| 1-11 | 3110 | QSALTQPASVSGSPGQSITISCTGTSSDVGTYNLVSWYQQHPGKAPKLMIYEGYKRPSG |
| | | VSNRFSGSKSGNTASLTISGLQAEDEADYYCCSYAGNLWLFGGGTKLTVL |
| 1-12 | 3111 | QSALTQPASVSGSPGQSITISCTGTSSDVGHYNLVSWYQQHPGKAPKLMIYEGGKRPSG |
| | | VSNRFSGSKSGNTASLTISGLQAEDEADYYCCSYAGRDTYVAFGGGTKLTVL |
| 1-13 | 3112 | QSALTQPASVSGSPGQSITISCTGTSSDVGRYNLVSWYQQHPGKAPKLMIYEGTKRPSG |
| | | VSNRFSGSKSGNTASLTISGLQAEDEADYYCCSYAGSRTVVFGGGTKLTVL |
| 1-14 | 3113 | QSALTQPASVSGSPGQSITISCTGASSDVGSYNLVSWYQQHPGKAPKLMIYEGTKRPSG |
| | | VSNRFSGSKSGNTASLTISGLQAEDEADYYCCSYAGSSGVFGGGTKLTVL |
| 1-15 | 3114 | QSALTQPASVSGSPGQSITISCTGTSTDVGSYNLVSWYQQHPGKAPKLMIYEGFKRPSG |
| | | VSNRFSGSKSGNTASLTISGLQAEDEADYYCCSYAGSYTLGVFGGGTKLTVL |
| 1-16 | 3115 | QSALTQPASVSGSPGQSITISCTGTTSDVGSYNLVSWYQQHPGKAPKLMIYEGTKRPSG |
| | | VSNRFSGSKSGNTASLTISGLQAKDEADYYCSYTSSRTGVFGGGTKLTVL |
| 1-17 | 3116 | QSALTQPASVSGSPGQSITISCTATSSDVGSYNLVSWYQQHPGKAPKLMIYEGTKRPSG |
| | | VSNRFSGSKSGNTASLTISGLQAEDEADYYCCSYAGSWVFGGGTKLTVL |
| 1-18 | 3117 | QSALTQPASVSGSPGQSITISCTGTSSDVGSNNLVSWYQQHPGKAPKLMIYEGSKWPSG |
| | | VSNRFSGSKSGNTASLTISGLQAEDEADYYCCSFAGSSTDVVFGGGTKLTVL |
| 1-19 | 3118 | QSALTQPASVSGSPGQSITISCTGASSDVGSYNLVSWYQQHPGKAPKLMIYEGFKRPSG |
| | | VSNRFSGSKSGNTASLTISGLQAEDEADYYCCSYAGSHTYVFGGGTKLTVL |
| 1-20 | 3119 | QSALTQPASVSGSPGQSITISCTGTSSDVGSYYLVSWYQQHPGKAPKLMIYEGFKRPSG |
| | | VSNRFSGSKSGNTASLTISGLQAEDEADYYCCSYAGSLYVFGGGTKLTVL |
| 1-21 | 3120 | QSALTQPASVSGSPGQSITISCTGTSSDVGSYSLVSWYQQHPGKAPKLMIYEGDKRPSG |
| | | VSNRFSGSKSGNTASLTISGLQAEDEADYYCCSYAGSRRVFGGGTKLTVL |
| 1-22 | 3121 | QSALTQPASVSGSPGQSITISCTGSSSDVGSYNLVSWYQQHPGKAPKLMIYEGTKRPSG |
| | | VSNRFSGSKSGNTASLTISGLQAEDEADYYCCSYAGSSNWVFGGGTKLTVL |
| 1-23 | 3122 | QSALTQPASVSGSPGQSITISCTGTSSDVGYYNLVSWYQQHPGKAPKLMIYEGGKRPSG |
| | | VSNRFSGSKSGNTASLTISGLQAEDEADYYCCSYAGSSTPYVVFGGGTKLTVL |
| 1-24 | 3123 | QSALTQPASVSGSPGQSITISCTGTSSDVGSNNLVSWYQQHPGKAPKLMIYEGSKWPSG |
| | | VSNRFSGSKSGNTASLTISGLQAEDEADYYCCSFAGSSTDVVFGGGTKLTVL |
| 1-25 | 3124 | QSALTQPASVSGSPGQSITISCTGTSSDVGSSNLVSWYQQHPGKAPKLMIYEGDKRPSG |
| | | VSNRFSGSKSGNTASLTISGLQAEDEADYYCCSYAGSYGVVFGGGTKLTVL |
| 1-26 | 3125 | QSALTQPASVSGSPGQSITISCTGTSSDIGSYNLVSWYQQHPGKAPKLMIYEGFKRPSGV |
| | | SNRFSGSKSGNTASLTISGLQAEDEADYYCCSYAGSYSVVFGGGTKLTVL |
| 1-27 | 3126 | QSALTQPASVSGSPGQSITISCTGTSSDVGAYNLVSWYQQHPGKAPKLMIHEGNKRPSG |
| | | VSNRFSGSKSGNTASLTISGLQAEDEADYYCCSYAGDSFPYVFGGGTKLTVL |
| 1-28 | 3127 | QSALTQPASVSGSPGQSITISCTGTSRDVGSYNLVSWYQQHPGKAPKLMIYEASKRPSG |
| | | VSNRFSGSKSGNTASLTISGLQAEDEADYYCCSYAGSYTLYVFGGGTKLTVL |
| 1-29 | 3128 | QSALTQPASVSGSPGQSITISCTGTSSDVGHYNLVSWYQQHPGKAPKLMIYEGGKRPSG |
| | | VSNRFSGSKSGNTASLTISGLQAEDEADYYCCSYAGSSIYVFGGGTKLTVL |
| 1-30 | 3129 | QSALTQPASVSGSPGQSITISCTGTSSDVGNYNLVSWYQQHPGKAPKLMIYEGTKRPSG |
| | | VSNRFSGSKSGNTASLTISGLQAEDEADYYCCSYAGTVVFGGGTKLTVL |
| 1-31 | 3130 | QSALTQPASVSGSPGQSITISCTGTSSDVGKYNLVSWYQQHPGKAPKLMIYEGSQRPSG |
| | | VSNRFSGSKSGNTASLTISGLQAEDEADYYCCSYAGSSTVFGGGTKLTVL |
| 1-32 | 3131 | QSALTQPASVSGSPGQSITISCTGTSSDVGSNNLVSWYQQHPGKAPKLMIYEGDKRPSG |
| | | VSNRFSGSKSGNTASLTISGLQAEDEADYYCCSYTGSYTVVFGGGTKLTVL |
| 1-33 | 3132 | QSALTQPASVSGSPGQSITISCTGTSSDVGDYNLVSWYQQHPGKAPKLMIYEGGKRPSG |
| | | VSNRFSGSKSGNTASLTISGLQAEDEADYYCCSYAGSSTNVVFGGGTKLTVL |
| 1-34 | 3133 | QSALTQPASVSGSPGQSITISCTGTSSDVGKYNLVSWYQQHPGKAPKLMIYEASKRPSG |
| | | VSNRFSGSKSGNTASLTISGLQAEDEADYYCYSYAGSYTLGVFGGGTKLTVL |
| 1-35 | 3134 | QSALTQPASVSGSPGQSITISCTGTSSDVGSYNHVSWYQQHPGKAPKLMIYEGGKRPSG |
| | | VSNRFSGSKSGNTASLTISGLQAEDEADYYCCSYAGTTTPFVFGGGTKLTVL |
| 1-36 | 3135 | QSALTQPASVSGSPGQSITISCTGTSSDVGKYNLVSWYQQHPGKAPKLMIYETRKRPSG |
| | | VSNRFSGSKSGNTASLTISGLQAEDEADYYCCSYAGSSTVVFGGGTKLTVL |
| 2A-1 | 3136 | DIQMTQSPSSLSASVGDRVTITCRASQSIHRFLNWYQQKPGKAPKLLIYAASNLHSGVPS |
| | | RFSGSGSGTDFTLTISSLQPEDFATYYCQQSYGLPP-TFGQGTKVEIK |
| 2A-10 | 3137 | DIQMTQSPSSLSASVGDRVTITCRASQSIHISLNWYQQKPGKAPKLLIYLASPLASGVPS |
| | | RFSGSGSGTDFTLTISSLQPEDFATYYCQQSYSAPPYTFGQGTKVEIK |
| 2A-5 | 3138 | DIQMTQSPSSLSASVGDRVTITCRASQSIHTYLNWYQQKPGKAPKLLIYAASALASGVP |
| | | SRFSGSGSGTDFTLTISSLQPEDFATYYCQQSYSAPPYTFGQGTKVEIK |
| 2A-2 | 3139 | DIQMTQSPSSLSASVGDRVTITCRASQTINTYLNWYQQKPGKAPKLLIYSASTLQSGVPS |
| | | RFSGSGSGTDFTLTISSLQPEDFATYYCQQSYSTFTFGQGTKVEIK |
| 2A-4 | 3140 | DIQMTQSPSSLSASVGDRVTITCRASQSIDTYLNWYQQKPGKAPKLLIYAASALASGVP |
| | | SRFSGSGSGTDFTLTISSLQPEDFATYYCQQSYSAPPYTFGQGTKVEIK |
| 2A-6 | 3141 | DIQMTQSPSSLSASVGDRVTITCRASQSIDTYLNWYQQKPGKAPKLLIYAASALASGVP |
| | | SRFSGSGSGTDFTLTISSLQPEDFATYYCQQSYSAPPYTFGQGTKVEIK |
| 2A-11 | 3142 | DIQMTQSPSSLSASVGDRVTITCRASQSIGNYLNWYQQKPGKAPKLLIYGVSSLQSGVP |
| | | SRFSGSGSGTDFTLTISSLQPEDFATYYCQQSHSAPLTFGQGTKVEIK |
| 2A-12 | 3143 | DIQMTQSPSSLSASVGDRVTITCRASQSIDNYLNWYQQKPGKAPKLLIYGVSALQSGVP |
| | | SRFSGSGSGTDFTLTISSLQPEDFATYYCQQSHSAPPYFFGQGTKVEIK |
| 2A-13 | 3144 | DIQMTQSPSSLSASVGDRVTITCRASQSIDTYLNWYQQKPGKAPKLLIYGASALESGVPS |
| | | RFSGSGSGTDFTLTISSLQPEDFATYYCQQSHSAPPYFFGQGTKVEIK |
| 2A-14 | 3145 | DIQMTQSPSSLSASVGDRVTITCRASQSIDTYLNWYQQKPGKAPKLLIYGVSALQSGVP |
| | | SRFSGSGSGTDFTLTISSLQPEDFATYYCQQSYSAPPYFFGQGTKVEIK |
| 2A-7 | 3146 | DIQMTQSPSSLSASVGDRVTITCRASQSIDTYLNWYQQKPGKAPKLLIYAASALASGVP |
| | | SRFSGSGSGTDFTLTISSLQPEDFATYYCQQSYSAPPYTFGQGTKVEIK |
| 2A-8 | 3147 | DIQMTQSPSSLSASVGDRVTITCRASQSIDTYLNWYQQKPGKAPKLLIYAASALASGVP |
| | | SRFSGSGSGTDFTLTISSLQPEDFATYYCQQSYSAPPYTFGQGTKVEIK |
| 2A-15 | 3148 | DIQMTQSPSSLSASVGDRVTITCRASQSIDNYLNWYQQKPGKAPKLLIYGVSALQSGVP |
| | | SRFSGSGSGTDFTLTISSLQPEDFATYYCQQSHSAPLTFGQGTKVEIK |
| 2A-9 | 3149 | DIQMTQSPSSLSASVGDRVTITCRASQRIGTYLNWYQQKPGKAPKLLIYAASNLEGGVP |
| | | SRFSGSGSGTDFTLTISSLQPEDFATYYCQQNYSTTWTFGQGTKVEIK |
| 2A-16 | 3150 | DIQMTQSPSSLSASVGDRVTITCTGTSSDVGSYDLVSWYQQKPGKAPKLLIYEGNKRPS |
| | | GVPSRFSGSGSGTDFTLTISSLQPEDFATYYCCSYAGSSVVFGQGTKVEIK |
| 2A-17 | 3151 | DIQMTQSPSSLSASVGDRVTITCTGTSSDVGSSNLVSWYQQKPGKAPKLLIYEGSKRPS |
| | | GVPSRFSGSGSGTDFTLTISSLQPEDFATYYCCSYAGSLYVFGQGTKVEIK |
| 2A-18 | 3152 | DIQMTQSPSSLSASVGDRVTITCTGTSSDIGSYNLVSWYQQKPGKAPKLLIYEGTKRPSG |
| | | VPSRFSGSGSGTDFTLTISSLQPEDFATYYCCSYAGSRTYVFGQGTKVEIK |
| 2A-19 | 3153 | DIQMTQSPSSLSASVGDRVTITCTGTSTDVGSYNLVSWYQQKPGKAPKLLIYEGTKRPS |
| | | GVPSRFSGSGSGTDFTLTISSLQPEDFATYYCCSYAGSYTSVVFGQGTKVEIK |
| 2A-2 | 3154 | DIQMTQSPSSLSASVGDRVTITCTGTSSNVGSYNLVSWYQQKPGKAPKLLIYEGTKRPS |
| | | GVPSRFSGSGSGTDFTLTISSLQPEDFATYYCCSYAGSSSFVVFGQGTKVEIK |
| 2A-21 | 3155 | DIQMTQSPSSLSASVGDRVTITCRASQSIHTYLNWYQQKPGKAPKLLIYAASALASGVP |
| | | SRFSGSGSGTDFTLTISSLQPEDFATYYCQQSYSAPPYTFGQGTKVEIK |
| 2A-22 | 3156 | DIQMTQSPSSLSASVGDRVTITCRASQSIHTYLNWYQQKPGKAPKLLIYAASALASGVP |
| | | SRFSGSGSGTDFTLTISSLOPEDFATYYCQQSYSAPPYTFGQGTKVEIK |
| 2A-23 | 3157 | DIQMTQSPSSLSASVGDRVTITCRASQTINTFLNWYQQKPGKAPKLLIYSASTLQSGVPS |
| | | RFSGSGSGTDFTLTISSLQPEDFATYYCQQSYSTFTFGGGTKVEIK |
| 2A-24 | 3158 | SRFSGSGSGTDFTLTISSLQPEDFATYYCQQSYRTPPWTFGGGTKVEIK |
| 2A-25 | 3159 | DIQMTQSPSSLSASVGDRVTITCRSSQSISSYLNWYQQKPGEAPKLLIYGASRLRSGVPS |
| | | RFSGSGSGTDFTLTISSLQPEDFATYYCQQGYSAPWTFGGGTKVEIK |
| 2A-26 | 3160 | DIQMTQSPSSLSASVGDRVTITCRASQSISGSLNWYQQKPGKAPKLLIYAESRLHSGVPS |
| | | RFSGSGSGTDFTLTISSLQPEDFATYYCQQSYSPPQTFGGGTKVEIK |
| 2A-27 | 3161 | DIQMTQSPSSLSASVGDRVTITCRASRSISTYLNWYQQKPGKAPKLLIYAASNLQGGVP |
| | | SRLSGSGSGTDFTLTISSLQPEDFATYYCQQSHSIPRTFGGGTKVEIK |
| 2A-28 | 3162 | DIQMTQSPSSLSASVGDRVTITCRASQSIHTYLNWYQQKPGKAPKLLIYAASALASGVP |
| | | SRFSGSGSGTDFTLTISSLOPEDFATYYCQQSYSAPPYTFGQGTKVEIK |
| 3A-10 | 3163 | DIQMTQSPSSLSASVGDRVTITCRASQSIRKYLNWYQQKPGKAPKLLIYASSTLQRGVPS |
| | | RFSGSGSGTDFTLTISSLQPEDFATYYCQQSLSTPFTFGGGTKVEIK |
| 3A-4 | 3164 | DIQMTQSPSSLSASVGDRVTITCRASRSIRRYLNWYQQKPGKAPKLLIYASSSLQAGVPS |
| | | RFSGSGSGTDFTLTISSLQPEDFATYYCQQSYSTLLTFGQGTKVEIK |
| 3A-7 | 3165 | DIQMTQSPSSLSASVGDRVTITCRASQSIGRYLNWYQQKPGKAPKLLIYASSSLQSGVPS |
| | | RFSGSGSGTDFTLTISSLQPEDFATYYCQQSYSLPRTFGQGTKVEIK |
| 3A-1 | 3166 | DIQMTQSPSSLSASVGDRVTITCRASQTIYSYLNWYQQKPGKAPKLLIYATSTLQGGVP |
| | | SRFSGSGSGTDFTLTISSLQPEDFATYYCQHRGTFGQGTKVEIK |
| 3A-5 | 3167 | DIQMTQSPSSLSASVGDRVTITCRASQSIGRYLNWYQQKPGKAPKLLIYAASSLKSGVPS |
| | | RFSGSGSGTDFTLTISSLQPEDFATYYCQQSYSLPRTFGQGTKVEIK |
| 3A-6 | 3168 | DIQMTQSPSSLSASVGDRVTITCRASQSIGKYLNWYQQKPGKAPKLLIYASSSLQSGVPS |
| | | RFSGSGSGTDFTLTISSLQPEDFATYYCQQSYSPPFTFGQGTKVEIK |
| 3A-15 | 3169 | DIQMTQSPSSLSASVGDRVTITCRASQNIKTYLNWYQQKPGKAPKLLIYAASKLQSGVP |
| | | SRFSGSGSGTDFTLTISSLQPEDFATYYCQQSYSTSPTFGQGTKVEIK |
| 3A-3 | 3170 | DIQMTQSPSSLSASVGDRVTITCRASRSISRYLNWYQQKPGKAPKLLIYAASSLQAGVPS |
| | | RFSGSGSGTDFTLTISSLQPEDFATYYCQQSYSSLLTFGQGTKVEIK |
| 3A-11 | 3171 | DIQMTQSPSSLSASVGDRVTITCRASQSIGKYLNWYQQKPGKAPKLLIYASSTLQRGVP |
| | | SRFSGSGSGTDFTLTISSLQPEDFATYYCQQSLSPPFTFGQGTKVEIK |
| 3A-8 | 3172 | DIQMTQSPSSLSASVGDRVTITCRASQSIGRYLNWYQQKPGKAPKLLIYAASSLKSGVPS |
| | | RFSGSGSGTDFTLTISSLQPEDFATYYCQQSYSLPLTFGQGTKVEIK |
| 3A-2 | 3173 | DIQMTQSPSSLSASVGDRVTITCRTSQSINTYLNWYQQKPGKAPKLLIYGASNVQSGVP |
| | | SRFSGSGSGTDFTLTISSLQPEDFATYYCQQSYRIPRTFGQGTKVEIK |
| 3A-12 | 3174 | DIQMTQSPSSLSASVGDRVTITCRASQSIGKYLNWYQQKPGKAPKLLIYASSTLQRGVP |
| | | SRFSGSGSGTDFTLTISSLQPEDFATYYCQQSLSTPFTFGQGTKVEIK |
| 3A-14 | 3175 | DIQMTQSPSSLSASVGDRVTITCRASQSIGKYLNWYQQKPGKAPKLLIYASSTLQRGVP |
| | | SRFSGSGSGTDFTLTISSLQPEDFATYYCQQSFSTPFTFGQGTKVEIK |
| 3A-9 | 3176 | DIQMTQSPSSLSASVGDRVTITCRASQSIGRYLNWYQQKPGKAPKLLIYAASSLKSGVPS |
| | | RFSGSGSGTDFTLTISSLOPEDFATYYCQQSYSLPRTFGQGTKVEIK |
| 3A-13 | 3177 | DIQMTQSPSSLSASVGDRVTITCRASQSIGKYLNWYQQKPGKAPKLLIYASSTLQRGVP |
| | | SRFSGSGSGTDFTLTISSLQPEDFATYYCQQSFSPPFTFGQGTKVEIK |
| 3A-16 | 3178 | DIQMTQSPSSLSASVGDRVTITCRASQIIGSYLNWYQQKPGKAPKLLIYTTSNLQSGVPS |
| | | RFSGSGSGTDFTLTISSLQPEDFATYYCQQSYITPWTFGQGTKVEIK |
| 3A-17 | 3179 | DIQMTQSPSSLSASVGDRVTITCRASQSISRYINWYQQKPGKAPKLLIYEASSLESGVPSR |
| | | FSGSGSGTDFTLTISSLQPEDFATYYCQQSHITPLTFGQGTKVEIK |
| 3A-18 | 3180 | DIQMTQSPSSLSASVGDRVTITCRASQSIYTYLNWYQQKPGKAPKLLIYSASNLHSGVPS |
| | | RFSGSGSGTDFTLTISSLQPEDFATYYCQQSDTTPWTFGQGTKVEIK |
| 3A-19 | 3181 | DIQMTQSPSSLSASVGDRVTITCRASQSIATYLNWYQQKPGKAPKLLIYGASSLEGGVPS |
| | | RFSGSGSGTDFTLTISSLQPEDFATYYCQQTFSSPFTFGQGTKVEIK |
| 3A-2 | 3182 | DIQMTQSPSSLSASVGDRVTITCRASQNINTYLNWYQQKPGKAPKLLIYSASSLQSGVPS |
| | | RFSGSGSGTDFTLTISSLQPEDFATYYCQQSSLTPWTFGQGTKVEIK |
| 3A-21 | 3183 | DIQMTQSPSSLSASVGDRVTITCRASQGIATYLNWYQQKPGKAPKLLIYYASNLQSGVP |
| | | SRFSGSGSGTDFTLTISSLOPEDFATYYCQQSYSTRFTFGQGTKVEIK |
| 3A-22 | 3184 | DIQMTQSPSSLSASVGDRVTITCRASERISNYLNWYQQKPGKAPKLLIYTASNLESGVPS |
| | | RFSGSGSGTDFTLTISSLQPEDFATYYCQQSYTPPRTFGQGTKVEIK |
| 3A-23 | 3185 | DIQMTQSPSSLSASVGDRVTITCRASQSISSSLNWYQQKPGKAPKLLIYAASRLQDGVPS |
| | | RFSGSGSGTDFTLTISSLQPEDFATYYCQQSYSTPRSFGQGTKVEIK |
| 3A-24 | 3186 | DIQMTQSPSSLSASVGDRVTITCRASQSISSHLNWYQQKPGKAPKLLIYRASTLQSGVPS |
| | | RFSGSGSGTDFTLTISSLQPEDFATYYCQQTYNTPQTFGQGTKVEIK |
| 3A-25 | 3187 | DIQMTQSPSSLSASVGDRVTITCRASQSISSYLIWYQQKPGKAPKLLIYAASRLHSGVPS |
| | | RFSGSGSGTDFTLTISSLQPEDFATYYCQQGYNTPRTFGQGTKVEIK |
| 3A-26 | 3188 | DIQMTQSPSSLSASVGDRVTITCRASPSISTYLNWYQQKPGKAPKLLIYTASRLQTGVPS |
| | | RFSGSGSGTDFTLTISSLOPEDFATYYCQQTYSTPSSFGQGTKVEIK |
| 3A-27 | 3189 | DIQMTQSPSSLSASVGDRVTITCRASQNIAKYLNWYQQKPGKAPKLLIYGASGLQSGVP |
| | | SRFSGSGSGTDFTLTISSLQPEDFATYYCQQSHSPPITFGQGTKVEIK |
| 3A-28 | 3190 | DIQMTQSPSSLSASVGDRVTITCRASQSIGTYLNWYQQKPGKAPKLLIYAASNLHSGVP |
| | | SRFSGSGSGTDFTLTISSLQPEDFATYYCQESYSAPYTFGQGTKVEIK |
| 3A-29 | 3191 | DIQMTQSPSSLSASVGDRVTITCRASQSISPYLNWYQQKPGKAPKLLIYKASSLQSGVPS |
| | | RFSGSGSGTDFTLTISSLQPEDFATYYCQQSSSTPYTFGQGTKVEIK |

TABLE 17
Antibody Sequences

| | SEQ | |
|---|---|---|
| Antibody | ID NO | Sequence |
| Antibody 1 | 3192 | EVQLVESGGGLVQPGGSLRL |
| | | SCAASGSTFSINAMGWFRQA |
| | | PGKEREFVAGITSSGGYTNY |
| | | ADSVKGRFTISADNSKNTAY |
| | | LQMNSLKPEDTAVYYCAADG |
| | | VPEYSDYASGPVWGQGTLVT |
| | | VSSGGGGSGGGGSASEVQLV |
| | | ESGGGLVQPGGSLRLSCAAS |
| | | GFTFSPSWMGWFRQAPGKER |
| | | EFVATINEYGGRNYADSVKG |
| | | RFTISADNSKNTAYLQMNSL |
| | | KPEDTAVYYCARVDRDFDYW |
| | | GQGTLVTVSSGGGGSEPKSS |
| | | DKTHTCPPCPAPELLGGPSV |
| | | FLFPPKPKDTLMISRTPEVT |
| | | CVVVDVSHEDPEVKFNWYVD |
| | | GVEVHNAKTKPREEQYNSTY |
| | | RVVSVLTVLHQDWLNGKEYK |
| | | CKVSNKALPAPIEKTISKAK |
| | | GQPREPQVYTLPPSREEMTK |
| | | NQVSLTCLVKGFYPSDIAVE |
| | | WESNGQPENNYKTTPPVLDS |
| | | DGSFFLYSKLTVDKSRWQQG |
| | | NVFSCSVMHEALHNHYTQKS |
| | | LSLSPG |
| Antibody 2 | 3193 | EVQLVESGGGLVQPGGSLRL |
| | | SCAASGFTFSPSWMGWFRQA |
| | | PGKEREFVATINEYGGRNYA |
| | | DSVKGRFTISADNSKNTAYL |
| | | QMNSLKPEDTAVYYCARVDR |
| | | DFDYWGQGTLVTVSSGGGGS |
| | | EPKSSDKTHTCPPCPAPELL |
| | | GGPSVFLFPPKPKDTLMISR |
| | | TPEVTCVVVDVSHEDPEVKF |
| | | NWYVDGVEVHNAKTKPREEQ |
| | | YNSTYRVVSVLTVLHQDWLN |
| | | GKEYKCKVSNKALPAPIEKT |
| | | ISKAKGQPREPQVYTLPPSR |
| | | EEMTKNQVSLTCLVKGFYPS |
| | | DIAVEWESNGQPENNYKTTP |
| | | PVLDSDGSFFLYSKLTVDKS |
| | | RWQQGNVFSCSVMHEALHNH |
| | | YTQKSLSLSPGGGGGSGGGG |
| | | SASEVQLVESGGGLVQPGGS |
| | | LRLSCAASGSTFSINAMGWF |
| | | RQAPGKEREFVAGITSSGGY |
| | | TNYADSVKGRFTISADNSKN |
| | | TAYLQMNSLKPEDTAVYYCA |
| | | ADGVPEYSDYASGPVWGQGT |
| | | LVTVSS |

### Example 7: Preventative v Therapeutic Studies of SARS-CoV-2 Antibodies in Hamsters

[0235] This example is designed to compare low dose (1 mg/kg) preventative treatment to therapeutic low dose (1.5 mg/kg), early post-infection treatment in hamsters.

[0236] In a therapeutic model, hamsters treated at 6 and 48 hours post SARS-CoV-2 infection challenge compared to vehicle with significant protection particularly on days 5-8 (FIG. 22).

[0237] While preferred embodiments of the present disclosure have been shown and described herein, it will be obvious to those skilled in the art that such embodiments are provided by way of example only. Numerous variations, changes, and substitutions will now occur to those skilled in the art without departing from the disclosure. It should be understood that various alternatives to the embodiments of the disclosure described herein may be employed in practicing the disclosure. It is intended that the following claims define the scope of the disclosure and that methods and structures within the scope of these claims and their equivalents be covered thereby.

The application's sequence listing, which the Patent Office published only in electronic form, follows.

SEQUENCE LISTING (3228 sequences)

SEQ ID NO: 1 - protein, 9 aa, synthetic construct
FTFSSYAMN

SEQ ID NO: 2 - protein, 9 aa, synthetic construct
FTFSSYGMS

SEQ ID NO: 3 - protein, 9 aa, synthetic construct
FRFSSYSMS

SEQ ID NO: 4 - protein, 9 aa, synthetic construct
FTFSAYAMS

SEQ ID NO: 5 - protein, 8 aa, synthetic construct
FFSSYAMG

SEQ ID NO: 6 - protein, 9 aa, synthetic construct
FTFSSFAMS

SEQ ID NO: 7 - protein, 9 aa, synthetic construct
FTFSAYAMS

SEQ ID NO: 8 - protein, 9 aa, synthetic construct
FTFGSYAMS

SEQ ID NO: 9 - protein, 9 aa, synthetic construct
FTFSAYAMS

SEQ ID NO: 10 - protein, 9 aa, synthetic construct
FIFSSYAMS

SEQ ID NO: 11 - protein, 9 aa, synthetic construct
FTFSDYAMS

SEQ ID NO: 12 - protein, 9 aa, synthetic construct
FTFSSYAMI

SEQ ID NO: 13 - protein, 9 aa, synthetic construct
FTFGSYAMS

SEQ ID NO: 14 - protein, 9 aa, synthetic construct
FTFSRYAMS

SEQ ID NO: 15 - protein, 9 aa, synthetic construct
STFSSYAMS

SEQ ID NO: 16 - protein, 9 aa, synthetic construct
FTFSSYAMT

SEQ ID NO: 17 - protein, 9 aa, synthetic construct
FTFSSYVMS

SEQ ID NO: 18 - protein, 8 aa, synthetic construct
FTFSSYAN

SEQ ID NO: 19 - protein, 9 aa, synthetic construct
FTFSSYDMS

SEQ ID NO: 20 - protein, 9 aa, synthetic construct
FTFSGYAMS

SEQ ID NO: 21 - protein, 9 aa, synthetic construct
FTLSSYAMS

SEQ ID NO: 22 - protein, 9 aa, synthetic construct
FIFSSYAMS

SEQ ID NO: 23 - protein, 9 aa, synthetic construct
FTFSSYAMG

SEQ ID NO: 24 - protein, 9 aa, synthetic construct
STFSSYAMS

SEQ ID NO: 25 - protein, 9 aa, synthetic construct
FTFSSYTMS

SEQ ID NO: 26 - protein, 9 aa, synthetic construct
FTFSSYAMY

SEQ ID NO: 27 - protein, 9 aa, synthetic construct
FTFRSYAMS

SEQ ID NO: 28 - protein, 9 aa, synthetic construct
FTFSSYTMS

SEQ ID NO: 29 - protein, 9 aa, synthetic construct
FTFSSQAMS

SEQ ID NO: 30 - protein, 9 aa, synthetic construct
FTFSSYPMS

SEQ ID NO: 31 - protein, 9 aa, synthetic construct
FTFSSYAMT

SEQ ID NO: 32 - protein, 9 aa, synthetic construct
FTFSSYAMS

SEQ ID NO: 33 - protein, 9 aa, synthetic construct
FTFSSYAMS

SEQ ID NO: 34 - protein, 9 aa, synthetic construct
FTFSSYAVS

SEQ ID NO: 35 - protein, 9 aa, synthetic construct
FTFSSYPMS

SEQ ID NO: 36 - protein, 9 aa, synthetic construct
FTFSSYGMS

SEQ ID NO: 37 - protein, 9 aa, synthetic construct
RTFCRYSMG

SEQ ID NO: 38 - protein, 9 aa, synthetic construct
NIFSRYIMG

SEQ ID NO: 39 - protein, 9 aa, synthetic construct
RTLAGYTMG

SEQ ID NO: 40 - protein, 9 aa, synthetic construct
STLSRYSMG

SEQ ID NO: 41 - protein, 9 aa, synthetic construct
SIFSSAAMG

SEQ ID NO: 42 - protein, 8 aa, synthetic construct
TFSGYLMG

SEQ ID NO: 43 - protein, 9 aa, synthetic construct
RTFSSYDMG

SEQ ID NO: 44 - protein, 8 aa, synthetic construct
SISSYFMG

SEQ ID NO: 45 - protein, 9 aa, synthetic construct
PTFSTYAMG

SEQ ID NO: 46 - protein, 9 aa, synthetic construct
IIGSFRTMG

SEQ ID NO: 47 - protein, 9 aa, synthetic construct
GTFASYGMG

SEQ ID NO: 48 - protein, 9 aa, synthetic construct
LTFRNYAMG

SEQ ID NO: 49 - protein, 9 aa, synthetic construct
SISTINVMG

SEQ ID NO: 50 - protein, 8 aa, synthetic construct
GTLSSYIG

SEQ ID NO: 51 - protein, 9 aa, synthetic construct
RTFRRYPMG

SEQ ID NO: 52 - protein, 9 aa, synthetic construct
STFSIDVMG

SEQ ID NO: 53 - protein, 9 aa, synthetic construct
RTSSSAVMG

SEQ ID NO: 54 - protein, 9 aa, synthetic construct
GTFSSYRMG

SEQ ID NO: 55 - protein, 8 aa, synthetic construct
TIFASAMG

SEQ ID NO: 56 - protein, 7 aa, synthetic construct
FGIDAMG

SEQ ID NO: 57 - protein, 9 aa, synthetic construct
NIIGGNHMG

SEQ ID NO: 58 - protein, 9 aa, synthetic construct
RTFSRYDMG

SEQ ID NO: 59 - protein, 12 aa, synthetic construct
QPAPELRGYGMG

SEQ ID NO: 60 - protein, 9 aa, synthetic construct
INFSRYGMG

SEQ ID NO: 61 - protein, 9 aa, synthetic construct
RTFRRYAMG

SEQ ID NO: 62 - protein, 9 aa, synthetic construct
GTFGHYAMG

SEQ ID NO: 63 - protein, 9 aa, synthetic construct
FTLDDYAMG

SEQ ID NO: 64 - protein, 9 aa, synthetic construct
FTFRRYDMG

SEQ ID NO: 65 - protein, 9 aa, synthetic construct
INFSRNAMG

SEQ ID NO: 66 - protein, 9 aa, synthetic construct
RTFTTYGMG

SEQ ID NO: 67 - protein, 9 aa, synthetic construct
STFSINAMG

SEQ ID NO: 68 - protein, 9 aa, synthetic construct
FTFSNYAMR

SEQ ID NO: 69 - protein, 9 aa, synthetic construct
FAFSRHAMS

SEQ ID NO: 70 - protein, 9 aa, synthetic construct
RTFSINAMG

SEQ ID NO: 71 - protein, 9 aa, synthetic construct
FTFSSYGMN

SEQ ID NO: 72 - protein, 9 aa, synthetic construct
RTFSTDAMG

SEQ ID NO: 73 - protein, 7 aa, synthetic construct
RIFYPMG

SEQ ID NO: 74 - protein, 9 aa, synthetic construct
FTFGSYDMG

SEQ ID NO: 75 - protein, 9 aa, synthetic construct
STFTINAMG

SEQ ID NO: 76 - protein, 9 aa, synthetic construct
GTFSSIGMG

SEQ ID NO: 77 - protein, 6 aa, synthetic construct
RTYAMG

SEQ ID NO: 78 - protein, 9 aa, synthetic construct
LPFSTKSMG

SEQ ID NO: 79 - protein, 9 aa, synthetic construct
RTIVPYTMG

SEQ ID NO: 80 - protein, 9 aa, synthetic construct
LRLNMHRMG

SEQ ID NO: 81 - protein, 9 aa, synthetic construct
STFSINAMG

SEQ ID NO: 82 - protein, 9 aa, synthetic construct
STLPYHAMG

SEQ ID NO: 83 - protein, 9 aa, synthetic construct
FTFTSYAIS

SEQ ID NO: 84 - protein, 9 aa, synthetic construct
FSLDYYGMG

SEQ ID NO: 85 - protein, 9 aa, synthetic construct
LTDRRYTMG

SEQ ID NO: 86 - protein, 9 aa, synthetic construct
RTFRRYTMG

SEQ ID NO: 87 - protein, 9 aa, synthetic construct
PTFSIYAMG

SEQ ID NO: 88 - protein, 9 aa, synthetic construct
RTISRYTMG

SEQ ID NO: 89 - protein, 9 aa, synthetic construct
RTITRYTMG

SEQ ID NO: 90 - protein, 9 aa, synthetic construct
FTFENHAMG

SEQ ID NO: 91 - protein, 9 aa, synthetic construct
FTFSRHAMN

SEQ ID NO: 92 - protein, 9 aa, synthetic construct
FTFDDYSMG

SEQ ID NO: 93 - protein, 9 aa, synthetic construct
STFSINAMG

SEQ ID NO: 94 - protein, 6 aa, synthetic construct
QTFNMG

SEQ ID NO: 95 - protein, 9 aa, synthetic construct
NTFSDNPMG

SEQ ID NO: 96 - protein, 9 aa, synthetic construct
RTHSIYPMG

SEQ ID NO: 97 - protein, 9 aa, synthetic construct
RTFSMHAMG

SEQ ID NO: 98 - protein, 9 aa, synthetic construct
FTFSNYSMG

SEQ ID NO: 99 - protein, 9 aa, synthetic construct
STFSVNAMG

SEQ ID NO: 100 - protein, 9 aa, synthetic construct
SIGSINAMG

SEQ ID NO: 101 - protein, 9 aa, synthetic construct
RTFGSYDMG

SEQ ID NO: 102 - protein, 9 aa, synthetic construct
GTFGHYAMG

SEQ ID NO: 103 - protein, 9 aa, synthetic construct
FGFGSYDMG

SEQ ID NO: 104 - protein, 9 aa, synthetic construct
STLSINAMG

SEQ ID NO: 105 - protein, 9 aa, synthetic construct
RPFSEYTMG

SEQ ID NO: 106 - protein, 9 aa, synthetic construct
RTFSNYPMG

SEQ ID NO: 107 - protein, 9 aa, synthetic construct
RTFRRYTMG

SEQ ID NO: 108 - protein, 9 aa, synthetic construct
RTFSTYVMG

SEQ ID NO: 109 - protein, 9 aa, synthetic construct
FTLDYYGMG

SEQ ID NO: 110 - protein, 9 aa, synthetic construct
FTFGHYAMG

SEQ ID NO: 111 - protein, 9 aa, synthetic construct
FTFEDYAMG

SEQ ID NO: 112 - protein, 9 aa, synthetic construct
RTLSRYTMG

SEQ ID NO: 113 - protein, 9 aa, synthetic construct
RTFASYAMG

SEQ ID NO: 114 - protein, 7 aa, synthetic construct
GTYHAMG

SEQ ID NO: 115 - protein, 9 aa, synthetic construct
TTLDYYAMG

SEQ ID NO: 116 - protein, 9 aa, synthetic construct
GTLSRSRMG

SEQ ID NO: 117 - protein, 9 aa, synthetic construct
GTFSFYNMG

SEQ ID NO: 118 - protein, 9 aa, synthetic construct
FTFDYYAMG

SEQ ID NO: 119 - protein, 9 aa, synthetic construct
FPFSIWPMG

SEQ ID NO: 120 - protein, 8 aa, synthetic construct
FAESSSMG

SEQ ID NO: 121 - protein, 9 aa, synthetic construct
FTFGTTTMG

SEQ ID NO: 122 - protein, 9 aa, synthetic construct
FIGNYHAMG

SEQ ID NO: 123 - protein, 9 aa, synthetic construct
RTFSDDTMG

SEQ ID NO: 124 - protein, 9 aa, synthetic construct
RTFGDYIMG

SEQ ID NO: 125 - protein, 9 aa, synthetic construct
RTFSDDAMG

SEQ ID NO: 126 - protein, 9 aa, synthetic construct
RTFGDYIMG

SEQ ID NO: 127 - protein, 9 aa, synthetic construct
RTFGDDTMG

SEQ ID NO: 128 - protein, 9 aa, synthetic construct
RTFGDDTMG

SEQ ID NO: 129 - protein, 9 aa, synthetic construct
RTFGDYIMG

SEQ ID NO: 130 - protein, 9 aa, synthetic construct
RTFGDYIMG

SEQ ID NO: 131 - protein, 9 aa, synthetic construct
RTFGDYIMG

SEQ ID NO: 132 - protein, 9 aa, synthetic construct
RTFSDDTMG

SEQ ID NO: 133 - protein, 9 aa, synthetic construct
RTFGDYAMG

SEQ ID NO: 134 - protein, 9 aa, synthetic construct
RTFGDDTMG

SEQ ID NO: 135 - protein, 9 aa, synthetic construct
RTFGDDTMG

SEQ ID NO: 136 - protein, 9 aa, synthetic construct
RTFSDDTMG

SEQ ID NO: 137 - protein, 9 aa, synthetic construct
RTFSDDTMG

SEQ ID NO: 138 - protein, 9 aa, synthetic construct
RTFSDYTMG

SEQ ID NO: 139 - protein, 9 aa, synthetic construct
RTFGDDTMG

SEQ ID NO: 140 - protein, 9 aa, synthetic construct
RTFGDYIMG

SEQ ID NO: 141 - protein, 9 aa, synthetic construct
RTFSDDTMG

SEQ ID NO: 142 - protein, 9 aa, synthetic construct
RTFGDDIMG

SEQ ID NO: 143 - protein, 9 aa, synthetic construct
RTFSDDTMG

SEQ ID NO: 144 - protein, 9 aa, synthetic construct
RTFGDYIMG

SEQ ID NO: 145 - protein, 9 aa, synthetic construct
RTFSDDAMG

SEQ ID NO: 146 - protein, 9 aa, synthetic construct
RTFSDYTMG

SEQ ID NO: 147 - protein, 9 aa, synthetic construct
GTFSRYAMG

SEQ ID NO: 148 - protein, 9 aa, synthetic construct
RTFSDDTMG

SEQ ID NO: 149 - protein, 9 aa, synthetic construct
RTFGDYIMG

SEQ ID NO: 150 - protein, 9 aa, synthetic construct
RTFGDDTMG

SEQ ID NO: 151 - protein, 9 aa, synthetic construct
RTFGDDTMG

SEQ ID NO: 152 - protein, 9 aa, synthetic construct
RTFGDYTMG

SEQ ID NO: 153 - protein, 9 aa, synthetic construct
RTFGDYIMG

SEQ ID NO: 154 - protein, 9 aa, synthetic construct
FTFDDYEMG

SEQ ID NO: 155 - protein, 9 aa, synthetic construct
FTFSRHDMG

SEQ ID NO: 156 - protein, 9 aa, synthetic construct
RTFGDYIMG

SEQ ID NO: 157 - protein, 11 aa, synthetic construct
QLANFASYAMG

SEQ ID NO: 158 - protein, 9 aa, synthetic construct
RTFGDYIMG

SEQ ID NO: 159 - protein, 9 aa, synthetic construct
RTFGDYGMG

SEQ ID NO: 160 - protein, 9 aa, synthetic construct
RTFSDDTMG

SEQ ID NO: 161 - protein, 9 aa, synthetic construct
RTFSNAAMG

SEQ ID NO: 162 - protein, 9 aa, synthetic construct
RTFSDDTMG

SEQ ID NO: 163 - protein, 9 aa, synthetic construct
RTFGDYIMG

SEQ ID NO: 164 - protein, 9 aa, synthetic construct
RTFGDDTMG

SEQ ID NO: 165 - protein, 9 aa, synthetic construct
RTFSDDTMG

SEQ ID NO: 166 - protein, 9 aa, synthetic construct
RTFGDYIMG

SEQ ID NO: 167 - protein, 9 aa, synthetic construct
RTFSDDAMG

SEQ ID NO: 168 - protein, 9 aa, synthetic construct
RTFGDYIMG

SEQ ID NO: 169 - protein, 9 aa, synthetic construct
FTFGDYVMG

SEQ ID NO: 170 - protein, 9 aa, synthetic construct
RTFSDDAMG

SEQ ID NO: 171 - protein, 9 aa, synthetic construct
RTFGDYIMG

SEQ ID NO: 172 - protein, 9 aa, synthetic construct
GTFSNSGMG

SEQ ID NO: 173 - protein, 9 aa, synthetic construct
FTFSNYATD

SEQ ID NO: 174 - protein, 9 aa, synthetic construct
FTFSRHAMN

SEQ ID NO: 175 - protein, 9 aa, synthetic construct
FTFSDFAMA

SEQ ID NO: 176 - protein, 9 aa, synthetic construct
FTFSDFAMA

SEQ ID NO: 177 - protein, 9 aa, synthetic construct
FTFSDFAMA

SEQ ID NO: 178 - protein, 9 aa, synthetic construct
FTFSDFAMA

SEQ ID NO: 179 - protein, 9 aa, synthetic construct
FTFSDFAMA

SEQ ID NO: 180 - protein, 9 aa, synthetic construct
FTFSDFAMA

SEQ ID NO: 181 - protein, 9 aa, synthetic construct
FTFPRYAMS

SEQ ID NO: 182 - protein, 9 aa, synthetic construct
FTFSAFAMG

SEQ ID NO: 183 - protein, 9 aa, synthetic construct
FTFSNYPMN

SEQ ID NO: 184 - protein, 9 aa, synthetic construct
FTFSDYPMN

SEQ ID NO: 185 - protein, 9 aa, synthetic construct
FTFSDYPMN

SEQ ID NO: 186 - protein, 9 aa, synthetic construct
FTFSDYPMN

SEQ ID NO: 187 - protein, 9 aa, synthetic construct
FTFSDYPMN

SEQ ID NO: 188 - protein, 9 aa, synthetic construct
FMFGNYAMS

SEQ ID NO: 189 - protein, 9 aa, synthetic construct
FTFRSHAMN

SEQ ID NO: 190 - protein, 9 aa, synthetic construct
FTFRNYAMA

SEQ ID NO: 191 - protein, 9 aa, synthetic construct
FTFRNHAMA

SEQ ID NO: 192 - protein, 9 aa, synthetic construct
FTITNYAMS

SEQ ID NO: 193 - protein, 9 aa, synthetic construct
FTIPNYAMS

SEQ ID NO: 194 - protein, 9 aa, synthetic construct
FTIPNYAMS

SEQ ID NO: 195 - protein, 9 aa, synthetic construct
FTITNYAMS

SEQ ID NO: 196 - protein, 9 aa, synthetic construct
FTITNYAMS

SEQ ID NO: 197 - protein, 9 aa, synthetic construct
FTFRSHAMS

SEQ ID NO: 198 - protein, 9 aa, synthetic construct
FTIRNYAMS

SEQ ID NO: 199 - protein, 9 aa, synthetic construct
FTFRSHAMS

SEQ ID NO: 200 - protein, 9 aa, synthetic construct
FTFRSHAMS

SEQ ID NO: 201 - protein, 9 aa, synthetic construct
FTFRSYAMS

SEQ ID NO: 202 - protein, 9 aa, synthetic construct
FTFSAYSMS

SEQ ID NO: 203 - protein, 9 aa, synthetic construct
FTFSNYATD

SEQ ID NO: 204 - protein, 9 aa, synthetic construct
FTFSAFAMG

SEQ ID NO: 205 - protein, 9 aa, synthetic construct
FTFSDFAMA

SEQ ID NO: 206 - protein, 9 aa, synthetic construct
FTFSRHAMN

SEQ ID NO: 207 - protein, 9 aa, synthetic construct
FTFSDFAMA

SEQ ID NO: 208 - protein, 9 aa, synthetic construct
FTFSNYPMN

SEQ ID NO: 209 - protein, 9 aa, synthetic construct
FTFSDFAMA

SEQ ID NO: 210 - protein, 9 aa, synthetic construct
FTFSDYPMN

SEQ ID NO: 211 - protein, 9 aa, synthetic construct
FTFSDYPMN

SEQ ID NO: 212 - protein, 9 aa, synthetic construct
FTFSDFAMA

SEQ ID NO: 213 - protein, 9 aa, synthetic construct
FTFSDYPMN

SEQ ID NO: 214 - protein, 9 aa, synthetic construct
FTFSDFAMA

SEQ ID NO: 215 - protein, 9 aa, synthetic construct
FTFSDFAMA

SEQ ID NO: 216 - protein, 9 aa, synthetic construct
FTFPRYAMS

SEQ ID NO: 217 - protein, 9 aa, synthetic construct
FTFSSYAMS

SEQ ID NO: 218 - protein, 9 aa, synthetic construct
FTFSNYAMS

SEQ ID NO: 219 - protein, 9 aa, synthetic construct
FTFSSYAMY

SEQ ID NO: 220 - protein, 9 aa, synthetic construct
FTFSSYTMS

SEQ ID NO: 221 - protein, 9 aa, synthetic construct
FTFSSYDMS

SEQ ID NO: 222 - protein, 9 aa, synthetic construct
FTFPRYAMS

SEQ ID NO: 223 - protein, 9 aa, synthetic construct
FTFTTYALS

SEQ ID NO: 224 - protein, 9 aa, synthetic construct
FTFSRHAMN

SEQ ID NO: 225 - protein, 9 aa, synthetic construct
FVFSSYAMS

SEQ ID NO: 226 - protein, 9 aa, synthetic construct
FTLSSYVMS

SEQ ID NO: 227 - protein, 9 aa, synthetic construct
FTFSTYAMS

SEQ ID NO: 228 - protein, 9 aa, synthetic construct
FTYSNYAMT

SEQ ID NO: 229 - protein, 9 aa, synthetic construct
FTFSNYPMN

SEQ ID NO: 230 - protein, 9 aa, synthetic construct
FTFRSHAMS

SEQ ID NO: 231 - protein, 9 aa, synthetic construct
FTFSAYSMS

SEQ ID NO: 232 - protein, 9 aa, synthetic construct
FMFGNYAMS

SEQ ID NO: 233 - protein, 9 aa, synthetic construct
FTFRNHAMA

SEQ ID NO: 234 - protein, 9 aa, synthetic construct
FTIPNYAMS

SEQ ID NO: 235 - protein, 9 aa, synthetic construct
FTFRNYAMA

SEQ ID NO: 236 - protein, 9 aa, synthetic construct
FTIRNYAMS

SEQ ID NO: 237 - protein, 9 aa, synthetic construct
FTIPNYAMS

SEQ ID NO: 238 - protein, 9 aa, synthetic construct
FTITNYAMS

SEQ ID NO: 239 - protein, 9 aa, synthetic construct
FTFRSHAMS

SEQ ID NO: 240 - protein, 9 aa, synthetic construct
FTITNYAMS

SEQ ID NO: 241 - protein, 9 aa, synthetic construct
FTFRSHAMN

SEQ ID NO: 242 - protein, 9 aa, synthetic construct
FTFRSHAMS

SEQ ID NO: 243 - protein, 9 aa, synthetic construct
FTFRSYAMS

SEQ ID NO: 244 - protein, 9 aa, synthetic construct
FTITNYAMS

SEQ ID NO: 245 - protein, 9 aa, synthetic construct
FTFTNFAMS

SEQ ID NO: 246 - protein, 9 aa, synthetic construct
FTFRSYPMS

SEQ ID NO: 247 - protein, 9 aa, synthetic construct
FTLTSYAMS

SEQ ID NO: 248 - protein, 9 aa, synthetic construct
FTFINYAMS

SEQ ID NO: 249 - protein, 9 aa, synthetic construct
FPFSTYAMS

SEQ ID NO: 250 - protein, 9 aa, synthetic construct
FTFSTYAMG

SEQ ID NO: 251 - protein, 9 aa, synthetic construct
FIFSDYAMT

SEQ ID NO: 252 - protein, 9 aa, synthetic construct
FTFSDYAMT

SEQ ID NO: 253 - protein, 9 aa, synthetic construct
FTFSIYAMG

SEQ ID NO: 254 - protein, 9 aa, synthetic construct
FTFASYAMT

SEQ ID NO: 255 - protein, 9 aa, synthetic construct
FTFSEYAMS

SEQ ID NO: 256 - protein, 9 aa, synthetic construct
FTFDDYAMS

SEQ ID NO: 257 - protein, 9 aa, synthetic construct
FTFNNYAMN

SEQ ID NO: 258 - protein, 9 aa, synthetic construct
FTFTNHAMS

SEQ ID NO: 259 - protein, 7 aa, synthetic construct
PGTAIMG

SEQ ID NO: 260 - protein, 9 aa, synthetic construct
RSFSNSVMG

SEQ ID NO: 261 - protein, 9 aa, synthetic construct
RTFGDDTMG

SEQ ID NO: 262 - protein, 9 aa, synthetic construct
RTFSDARMG

SEQ ID NO: 263 - protein, 9 aa, synthetic construct
RTFGDYIMG

SEQ ID NO: 264 - protein, 9 aa, synthetic construct
SGLSINAMG

SEQ ID NO: 265 - protein, 9 aa, synthetic construct
RTFSNAAMG

SEQ ID NO: 266 - protein, 9 aa, synthetic construct
FSLDYYGMG

SEQ ID NO: 267 - protein, 9 aa, synthetic construct
FTFSRHDMG

SEQ ID NO: 268 - protein, 9 aa, synthetic construct
LTFRNYAMG

SEQ ID NO: 269 - protein, 9 aa, synthetic construct
GTFSRYAMG

SEQ ID NO: 270 - protein, 9 aa, synthetic construct
FTLDYYDMG

SEQ ID NO: 271 - protein, 9 aa, synthetic construct
RTFGDYIMG

SEQ ID NO: 272 - protein, 9 aa, synthetic construct
RTFGDDIMG

SEQ ID NO: 273 - protein, 9 aa, synthetic construct
RTFGDYIMG

SEQ ID NO: 274 - protein, 9 aa, synthetic construct
RTFGDYIMG

SEQ ID NO: 275 - protein, 9 aa, synthetic construct
RTFSDDTMG

SEQ ID NO: 276 - protein, 9 aa, synthetic construct
RTFGDDTMG

SEQ ID NO: 277 - protein, 9 aa, synthetic construct
RTFGDYIMG

SEQ ID NO: 278 - protein, 9 aa, synthetic construct
RTFGDDTMG

SEQ ID NO: 279 - protein, 9 aa, synthetic construct
RTFSDYTMG

SEQ ID NO: 280 - protein, 9 aa, synthetic construct
RTFGDYGMG

SEQ ID NO: 281 - protein, 9 aa, synthetic construct
RTFSDDTMG

SEQ ID NO: 282 - protein, 9 aa, synthetic construct
RTFSDDIMG

SEQ ID NO: 283 - protein, 9 aa, synthetic construct
RTFGDYIMG

SEQ ID NO: 284 - protein, 10 aa, synthetic construct
FTFDDDYVMG

SEQ ID NO: 285 - protein, 9 aa, synthetic construct
RTFGDYIMG

SEQ ID NO: 286 - protein, 9 aa, synthetic construct
RTFGDYIMG

SEQ ID NO: 287 - protein, 9 aa, synthetic construct
RTFGDDTMG

SEQ ID NO: 288 - protein, 9 aa, synthetic construct
RTFSDDTMG

SEQ ID NO: 289 - protein, 9 aa, synthetic construct
RTFSDDTMG

SEQ ID NO: 290 - protein, 9 aa, synthetic construct
RTFSDDTMG

SEQ ID NO: 291 - protein, 9 aa, synthetic construct
RTFSDDAMG

SEQ ID NO: 292 - protein, 9 aa, synthetic construct
RTFSDDTMG

SEQ ID NO: 293 - protein, 9 aa, synthetic construct
RTFGDYIMG

SEQ ID NO: 294 - protein, 9 aa, synthetic construct
RTFGDDTMG

SEQ ID NO: 295 - protein, 9 aa, synthetic construct
RTFSDDAMG

SEQ ID NO: 296 - protein, 9 aa, synthetic construct
RTFGDYIMG

SEQ ID NO: 297 - protein, 9 aa, synthetic construct
RTFSDDTMG

SEQ ID NO: 298 - protein, 9 aa, synthetic construct
RTFSDDAMG

SEQ ID NO: 299 - protein, 9 aa, synthetic construct
FTFDDYEMG

SEQ ID NO: 300 - protein, 9 aa, synthetic construct
RTFGDDTMG

SEQ ID NO: 301 - protein, 9 aa, synthetic construct
RTFSDDAMG

SEQ ID NO: 302 - protein, 9 aa, synthetic construct
VTLDDYAMG

SEQ ID NO: 303 - protein, 9 aa, synthetic construct
RTFGDYIMG

SEQ ID NO: 304 - protein, 9 aa, synthetic construct
LTFSDDTMG

SEQ ID NO: 305 - protein, 9 aa, synthetic construct
RTFGDDTMG

SEQ ID NO: 306 - protein, 9 aa, synthetic construct
RTFGDYIMG

SEQ ID NO: 307 - protein, 9 aa, synthetic construct
RTFGDDTMG

SEQ ID NO: 308 - protein, 9 aa, synthetic construct
RTFGDYTMG

SEQ ID NO: 309 - protein, 9 aa, synthetic construct
RTFSDDTMG

SEQ ID NO: 310 - protein, 9 aa, synthetic construct
RTFGDYAMG

SEQ ID NO: 311 - protein, 9 aa, synthetic construct
GTFSNSGMG

SEQ ID NO: 312 - protein, 11 aa, synthetic construct
QLANFASYAMG

SEQ ID NO: 313 - protein, 9 aa, synthetic construct
RTFSDDIMG

SEQ ID NO: 314 - protein, 9 aa, synthetic construct
RTFGDYIMG

SEQ ID NO: 315 - protein, 9 aa, synthetic construct
RTFSDDTMG

SEQ ID NO: 316 - protein, 9 aa, synthetic construct
RTFSDDTMG

SEQ ID NO: 317 - protein, 9 aa, synthetic construct
RTFGDYIMG

SEQ ID NO: 318 - protein, 9 aa, synthetic construct
RTFGDYIMG

SEQ ID NO: 319 - protein, 9 aa, synthetic construct
RTFSDDTMG

SEQ ID NO: 320 - protein, 9 aa, synthetic construct
RTFGDYAMG

SEQ ID NO: 321 - protein, 9 aa, synthetic construct
RTFGDDTMG

SEQ ID NO: 322 - protein, 9 aa, synthetic construct
RTFGDYIMG

SEQ ID NO: 323 - protein, 9 aa, synthetic construct
RTFGDYIMG

SEQ ID NO: 324 - protein, 9 aa, synthetic construct
RTFSDDTMG

SEQ ID NO: 325 - protein, 9 aa, synthetic construct
RTFGDYIMG

SEQ ID NO: 326 - protein, 9 aa, synthetic construct
RTFSDDTMG

SEQ ID NO: 327 - protein, 9 aa, synthetic construct
RTFSDYTMG

SEQ ID NO: 328 - protein, 9 aa, synthetic construct
RTFGDDTMG

SEQ ID NO: 329 - protein, 9 aa, synthetic construct
FAFGDNWIG

SEQ ID NO: 330 - protein, 9 aa, synthetic construct
RTFSDDAMG

SEQ ID NO: 331 - protein, 9 aa, synthetic construct
RTFSDDTMG

SEQ ID NO: 332 - protein, 9 aa, synthetic construct
RTFSDDTMG

SEQ ID NO: 333 - protein, 9 aa, synthetic construct
RTFGDDTMG

SEQ ID NO: 334 - protein, 9 aa, synthetic construct
RTFGDYIMG

SEQ ID NO: 335 - protein, 9 aa, synthetic construct
RTFSDDAMG

SEQ ID NO: 336 - protein, 9 aa, synthetic construct
RTFGDYIMG

SEQ ID NO: 337 - protein, 9 aa, synthetic construct
RTFGDDTMG

SEQ ID NO: 338 - protein, 9 aa, synthetic construct
RTFSDDTMG

SEQ ID NO: 339 - protein, 9 aa, synthetic construct
RTFGDYIMG

SEQ ID NO: 340 - protein, 9 aa, synthetic construct
FTFGDYVMG

SEQ ID NO: 341 - protein, 9 aa, synthetic construct
RTFGDYTMG

SEQ ID NO: 342 - protein, 9 aa, synthetic construct
RTFGDYIMG

SEQ ID NO: 343 - protein, 9 aa, synthetic construct
RTFGDYIMG

SEQ ID NO: 344 - protein, 9 aa, synthetic construct
RTFGDYIMG

SEQ ID NO: 345 - protein, 9 aa, synthetic construct
RTFGDYIMG

SEQ ID NO: 346 - protein, 9 aa, synthetic construct
FTWGDYTMG

SEQ ID NO: 347 - protein, 9 aa, synthetic construct
IPSTLRAMG

SEQ ID NO: 348 - protein, 10 aa, synthetic construct
FSFDDDYVMG

SEQ ID NO: 349 - protein, 9 aa, synthetic construct
RTFSNAAMG

SEQ ID NO: 350 - protein, 9 aa, synthetic construct
GTFGVYHMG

SEQ ID NO: 351 - protein, 9 aa, synthetic construct
FTFSSYYMG

SEQ ID NO: 352 - protein, 9 aa, synthetic construct
RTFSGDFMG

SEQ ID NO: 353 - protein, 9 aa, synthetic construct
STLRDYAMG

SEQ ID NO: 354 - protein, 9 aa, synthetic construct
FTFDDYTMG

SEQ ID NO: 355 - protein, 9 aa, synthetic construct
GTFSSYGMG

SEQ ID NO: 356 - protein, 10 aa, synthetic construct
FSFDDDYVMG

SEQ ID NO: 357 - protein, 10 aa, synthetic construct
FSFDDDYVMG

SEQ ID NO: 358 - protein, 9 aa, synthetic construct
NIAAINVMG

SEQ ID NO: 359 - protein, 9 aa, synthetic construct
IITSRYVMG

SEQ ID NO: 360 - protein, 10 aa, synthetic construct
FSFDDDYVMG

SEQ ID NO: 361 - protein, 9 aa, synthetic construct
SISSINVMG

SEQ ID NO: 362 - protein, 9 aa, synthetic construct
LTFILYRMG

SEQ ID NO: 363 - protein, 9 aa, synthetic construct
GTFSVYHMG

SEQ ID NO: 364 - protein, 9 aa, synthetic construct
RAFSTYGMG

SEQ ID NO: 365 - protein, 9 aa, synthetic construct
RTFSDIAMG

SEQ ID NO: 366 - protein, 9 aa, synthetic construct
RTFSSARMG

SEQ ID NO: 367 - protein, 9 aa, synthetic construct
FAFSSYAMG

SEQ ID NO: 368 - protein, 9 aa, synthetic construct
ITFRRHDMG

SEQ ID NO: 369 - protein, 9 aa, synthetic construct
TAASFNPMG

SEQ ID NO: 370 - protein, 9 aa, synthetic construct
NINIINYMG

SEQ ID NO: 371 - protein, 9 aa, synthetic construct
FTFDDYAMG

SEQ ID NO: 372 - protein, 9 aa, synthetic construct
NIFTRNVMG

SEQ ID NO: 373 - protein, 9 aa, synthetic construct
RTFSSIAMG

SEQ ID NO: 374 - protein, 9 aa, synthetic construct
IPSTLRAMG

SEQ ID NO: 375 - protein, 9 aa, synthetic construct
FTLDDSAMG

SEQ ID NO: 376 - protein, 9 aa, synthetic construct
SISSFNAMG

SEQ ID NO: 377 - protein, 9 aa, synthetic construct
NIFSDNIIG

SEQ ID NO: 378 - protein, 9 aa, synthetic construct
SISSIGAMG

SEQ ID NO: 379 - protein, 9 aa, synthetic construct
FTFDDYGMG

SEQ ID NO: 380 - protein, 9 aa, synthetic construct
RTFSNYTMG

SEQ ID NO: 381 - protein, 6 aa, synthetic construct
STNYMG

SEQ ID NO: 382 - protein, 9 aa, synthetic construct
GTFSSVGMG

SEQ ID NO: 383 - protein, 9 aa, synthetic construct
RIFTNTAMG

SEQ ID NO: 384 - protein, 9 aa, synthetic construct
EEFSDHWMG

SEQ ID NO: 385 - protein, 9 aa, synthetic construct
RTFSSIAMG

SEQ ID NO: 386 - protein, 9 aa, synthetic construct
STSSLRTMG

SEQ ID NO: 387 - protein, 10 aa, synthetic construct
GGTFGSYAMG

SEQ ID NO: 388 - protein, 9 aa, synthetic construct
RTFSNAAMG

SEQ ID NO: 389 - protein, 9 aa, synthetic construct
IILSDNAMG

SEQ ID NO: 390 - protein, 9 aa, synthetic construct
RTFGDYIMG

SEQ ID NO: 391 - protein, 9 aa, synthetic construct
FNFNWYPMG

SEQ ID NO: 392 - protein, 9 aa, synthetic construct
SIRSVSVMG

SEQ ID NO: 393 - protein, 9 aa, synthetic construct
MTFRLYAMG

SEQ ID NO: 394 - protein, 9 aa, synthetic construct
RTFSDDAMG

SEQ ID NO: 395 - protein, 9 aa, synthetic construct
GTFSVYAMG

SEQ ID NO: 396 - protein, 9 aa, synthetic construct
FALGYYAMG

SEQ ID NO: 397 - protein, 9 aa, synthetic construct
FNLDDYAMG

SEQ ID NO: 398 - protein, 9 aa, synthetic construct
NTFSGGFMG

SEQ ID NO: 399 - protein, 9 aa, synthetic construct
SIRSINIMG

SEQ ID NO: 400 - protein, 9 aa, synthetic construct
GTFSSIGMG

SEQ ID NO: 401 - protein, 9 aa, synthetic construct
LRFDDYAMG

SEQ ID NO: 402 - protein, 9 aa, synthetic construct
SIFSIDVMG

SEQ ID NO: 403 - protein, 9 aa, synthetic construct
FTLADYAMG

SEQ ID NO: 404 - protein, 9 aa, synthetic construct
RTFSSIAMG

SEQ ID NO: 405 - protein, 10 aa, synthetic construct
PTFSSYAMMG

SEQ ID NO: 406 - protein, 6 aa, synthetic construct
STGYMG

SEQ ID NO: 407 - protein, 9 aa, synthetic construct
RPFSEYTMG

SEQ ID NO: 408 - protein, 9 aa, synthetic construct
LTLSTYGMG

SEQ ID NO: 409 - protein, 9 aa, synthetic construct
FTFNNHNMG

SEQ ID NO: 410 - protein, 7 aa, synthetic construct
GIYRVMG

SEQ ID NO: 411 - protein, 9 aa, synthetic construct
YTDSNLWMG

SEQ ID NO: 412 - protein, 9 aa, synthetic construct
FTFDYYTMG

SEQ ID NO: 413 - protein, 9 aa, synthetic construct
GIFSINVMG

SEQ ID NO: 414 - protein, 9 aa, synthetic construct
FTFDGAAMG

SEQ ID NO: 415 - protein, 9 aa, synthetic construct
RTHSIYPMG

SEQ ID NO: 416 - protein, 9 aa, synthetic construct
PTFSIYAMG

SEQ ID NO: 417 - protein, 11 aa, synthetic construct
LTFDDNIHVMG

SEQ ID NO: 418 - protein, 9 aa, synthetic construct
LTLDYYAMG

SEQ ID NO: 419 - protein, 9 aa, synthetic construct
RTIVPYTMG

SEQ ID NO: 420 - protein, 9 aa, synthetic construct
GTFTTYHMG

SEQ ID NO: 421 - protein, 9 aa, synthetic construct
FTFNVFAMG

SEQ ID NO: 422 - protein, 9 aa, synthetic construct
SIFSIDVMG

SEQ ID NO: 423 - protein, 9 aa, synthetic construct
FTFSSYSMG

SEQ ID NO: 424 - protein, 9 aa, synthetic construct
NTFSINVMG

SEQ ID NO: 425 - protein, 9 aa, synthetic construct
RTISSYIMG

SEQ ID NO: 426 - protein, 9 aa, synthetic construct
RANSINWMG

SEQ ID NO: 427 - protein, 9 aa, synthetic construct
GTFSVFAMG

SEQ ID NO: 428 - protein, 9 aa, synthetic construct
FTFDDYPMG

SEQ ID NO: 429 - protein, 9 aa, synthetic construct
FALGYYAMG

SEQ ID NO: 430 - protein, 9 aa, synthetic construct
RTLDIHVMG

SEQ ID NO: 431 - protein, 9 aa, synthetic construct
FTPDNYAMG

SEQ ID NO: 432 - protein, 9 aa, synthetic construct
FTFDDYAMG

SEQ ID NO: 433 - protein, 9 aa, synthetic construct
RTFSRYIMG

SEQ ID NO: 434 - protein, 9 aa, synthetic construct
PTFSIYAMG

SEQ ID NO: 435 - protein, 9 aa, synthetic construct
RTFSLNAMG

SEQ ID NO: 436 - protein, 9 aa, synthetic construct
STFSINAMG

SEQ ID NO: 437 - protein, 9 aa, synthetic construct
RTFSMHAMG

SEQ ID NO: 438 - protein, 9 aa, synthetic construct
VTLDLYAMG

SEQ ID NO: 439 - protein, 9 aa, synthetic construct
LPFTINVMG

SEQ ID NO: 440 - protein, 9 aa, synthetic construct
RAFSNYAMG

SEQ ID NO: 441 - protein, 9 aa, synthetic construct
FTPDDYAMG

SEQ ID NO: 442 - protein, 9 aa, synthetic construct
FTLNYYGMG

SEQ ID NO: 443 - protein, 9 aa, synthetic construct
LPFSTKSMG

SEQ ID NO: 444 - protein, 9 aa, synthetic construct
RTFSINAMG

SEQ ID NO: 445 - protein, 9 aa, synthetic construct
EEFSDHWMG

SEQ ID NO: 446 - protein, 9 aa, synthetic construct
FTFGSYDMG

SEQ ID NO: 447 - protein, 9 aa, synthetic construct
LPLDLYAMG

SEQ ID NO: 448 - protein, 9 aa, synthetic construct
RTSTVNGMG

SEQ ID NO: 449 - protein, 9 aa, synthetic construct
FSLDYYGMG

SEQ ID NO: 450 - protein, 9 aa, synthetic construct
RPNSINWMG

SEQ ID NO: 451 - protein, 9 aa, synthetic construct
EKFSDHWMG

SEQ ID NO: 452 - protein, 9 aa, synthetic construct
LTVVPYAMG

SEQ ID NO: 453 - protein, 9 aa, synthetic construct
TTFNFNVMG

SEQ ID NO: 454 - protein, 9 aa, synthetic construct
IDVNRNAMG

SEQ ID NO: 455 - protein, 8 aa, synthetic construct
RTFSSNMG

SEQ ID NO: 456 - protein, 9 aa, synthetic construct
GTFSMGWIR

SEQ ID NO: 457 - protein, 9 aa, synthetic construct
CTLDYYAMG

SEQ ID NO: 458 - protein, 9 aa, synthetic construct
LTFSLYRMC

SEQ ID NO: 459 - protein, 9 aa, synthetic construct
RSFSSHRMG

SEQ ID NO: 460 - protein, 9 aa, synthetic construct
RIIVPNTMG

SEQ ID NO: 461 - protein, 8 aa, synthetic construct
SIFIISMG

SEQ ID NO: 462 - protein, 9 aa, synthetic construct
FSLDYYDMG

SEQ ID NO: 463 - protein, 9 aa, synthetic construct
TSISNRVMG

SEQ ID NO: 464 - protein, 9 aa, synthetic construct
NIDRLYAMG

SEQ ID NO: 465 - protein, 9 aa, synthetic construct
NTFTINVMG

SEQ ID NO: 466 - protein, 9 aa, synthetic construct
FNVNDYAMG

SEQ ID NO: 467 - protein, 9 aa, synthetic construct
FTFDHYTMG

SEQ ID NO: 468 - protein, 9 aa, synthetic construct
RTFGNYNMG

SEQ ID NO: 469 - protein, 9 aa, synthetic construct
FTMSSSWMG

SEQ ID NO: 470 - protein, 9 aa, synthetic construct
FTFSPSWMG

SEQ ID NO: 471 - protein, 9 aa, synthetic construct
FTRDYYTMG

SEQ ID NO: 472 - protein, 6 aa, synthetic construct
RTFTMG

SEQ ID NO: 473 - protein, 9 aa, synthetic construct
TTLDYYAMG

SEQ ID NO: 474 - protein, 9 aa, synthetic construct
FTFSSYWMG

SEQ ID NO: 475 - protein, 9 aa, synthetic construct
FTLSGIWMG

SEQ ID NO: 476 - protein, 9 aa, synthetic construct
FTFDYYAMG

SEQ ID NO: 477 - protein, 9 aa, synthetic construct
SIASIHAMG

SEQ ID NO: 478 - protein, 9 aa, synthetic construct
LAFNAYAMG

SEQ ID NO: 479 - protein, 9 aa, synthetic construct
STYTTYSMG

SEQ ID NO: 480 - protein, 9 aa, synthetic construct
LTFNDYAMG

SEQ ID NO: 481 - protein, 9 aa, synthetic construct
ITFRFKAMG

SEQ ID NO: 482 - protein, 9 aa, synthetic construct
STVLINAMG

SEQ ID NO: 483 - protein, 9 aa, synthetic construct
FTFDDAAMG

SEQ ID NO: 484 - protein, 9 aa, synthetic construct
NTGSTGYMG

SEQ ID NO: 485 - protein, 9 aa, synthetic construct
LTFRNYAMG

SEQ ID NO: 486 - protein, 9 aa, synthetic construct
SILSIAVMG

SEQ ID NO: 487 - protein, 9 aa, synthetic construct
STLPYHAMG

SEQ ID NO: 488 - protein, 9 aa, synthetic construct
TLFKINAMG

SEQ ID NO: 489 - protein, 9 aa, synthetic construct
RTFSEVVMG

SEQ ID NO: 490 - protein, 9 aa, synthetic construct
SIFSMNTMG

SEQ ID NO: 491 - protein, 9 aa, synthetic construct
FTLDYYAMG

SEQ ID NO: 492 - protein, 9 aa, synthetic construct
LTFGTYTMG

SEQ ID NO: 493 - protein, 9 aa, synthetic construct
DTFSTSWMG

SEQ ID NO: 494 - protein, 9 aa, synthetic construct
ITFRFKAMG

SEQ ID NO: 495 - protein, 9 aa, synthetic construct
DTYGSYWMG

SEQ ID NO: 496 - protein, 10 aa, synthetic construct
YTLKNYYAMG

SEQ ID NO: 497 - protein, 9 aa, synthetic construct
FAFGDSWMG

SEQ ID NO: 498 - protein, 9 aa, synthetic construct
DTFSANRMG

SEQ ID NO: 499 - protein, 9 aa, synthetic construct
FTLDYYDMG

SEQ ID NO: 500 - protein, 9 aa, synthetic construct
TFQRINHMG

SEQ ID NO: 501 - protein, 9 aa, synthetic construct
SAFRSNAMG

SEQ ID NO: 502 - protein, 9 aa, synthetic construct
FTLAYYAMG

SEQ ID NO: 503 - protein, 9 aa, synthetic construct
FDFSVSWMG

SEQ ID NO: 504 - protein, 9 aa, synthetic construct
HTFSTSWMG

SEQ ID NO: 505 - protein, 9 aa, synthetic construct
NTFSGGFMG

SEQ ID NO: 506 - protein, 9 aa, synthetic construct
FTFSPSWMG

SEQ ID NO: 507 - protein, 9 aa, synthetic construct
FTFSDYWMG

SEQ ID NO: 508 - protein, 9 aa, synthetic construct
FTFSTSWMG

SEQ ID NO: 509 - protein, 9 aa, synthetic construct
DTYGSYWMG

SEQ ID NO: 510 - protein, 10 aa, synthetic construct
RTFSSYAMMG

SEQ ID NO: 511 - protein, 9 aa, synthetic construct
GTFGVYHMG

SEQ ID NO: 512 - protein, 9 aa, synthetic construct
NMFSINAMG

SEQ ID NO: 513 - protein, 7 aa, synthetic construct
LTFSAMG

SEQ ID NO: 514 - protein, 9 aa, synthetic construct
RTFSMHAMG

SEQ ID NO: 515 - protein, 9 aa, synthetic construct
FTVSNYAMG

SEQ ID NO: 516 - protein, 9 aa, synthetic construct
STVLINAMG

SEQ ID NO: 517 - protein, 9 aa, synthetic construct
FSFDRWAMG

SEQ ID NO: 518 - protein, 9 aa, synthetic construct
YTYSSYVMG

SEQ ID NO: 519 - protein, 9 aa, synthetic construct
DTYGSYWMG

SEQ ID NO: 520 - protein, 9 aa, synthetic construct
ISINTNVMG

SEQ ID NO: 521 - protein, 9 aa, synthetic construct
FEFENHWMG

SEQ ID NO: 522 - protein, 9 aa, synthetic construct
FTMSSSWMG

SEQ ID NO: 523 - protein, 8 aa, synthetic construct
NIFRSNMG

SEQ ID NO: 524 - protein, 9 aa, synthetic construct
LTFDDHSMG

SEQ ID NO: 525 - protein, 9 aa, synthetic construct
RAVSTYAMG

SEQ ID NO: 526 - protein, 12 aa, synthetic construct
ISGSVFSRTPMG

SEQ ID NO: 527 - protein, 9 aa, synthetic construct
DTYGSYWMG

SEQ ID NO: 528 - protein, 9 aa, synthetic construct
DTYGSYWMG

SEQ ID NO: 529 - protein, 9 aa, synthetic construct
STFSGNWMG

SEQ ID NO: 530 - protein, 6 aa, synthetic construct
QTFNMG

SEQ ID NO: 531 - protein, 8 aa, synthetic construct
IPSIHAMG

SEQ ID NO: 532 - protein, 9 aa, synthetic construct
LPFSTLHMG

SEQ ID NO: 533 - protein, 9 aa, synthetic construct
LTFSLFAMG

SEQ ID NO: 534 - protein, 8 aa, synthetic construct
SFSNYAMG

SEQ ID NO: 535 - protein, 9 aa, synthetic construct
FTLSDRAMG

SEQ ID NO: 536 - protein, 9 aa, synthetic construct
GTFSSVGMG

SEQ ID NO: 537 - protein, 10 aa, synthetic construct
FNLDDYADMG

SEQ ID NO: 538 - protein, 9 aa, synthetic construct
ITFSNDAMG

SEQ ID NO: 539 - protein, 9 aa, synthetic construct
STLSINAMG

SEQ ID NO: 540 - protein, 9 aa, synthetic construct
HTFSGYAMG

SEQ ID NO: 541 - protein, 9 aa, synthetic construct
FAFGDSWMG

SEQ ID NO: 542 - protein, 9 aa, synthetic construct
GTFSTYWMG

SEQ ID NO: 543 - protein, 9 aa, synthetic construct
LAFDFDGMG

SEQ ID NO: 544 - protein, 9 aa, synthetic construct
FTFDRSWMG

SEQ ID NO: 545 - protein, 7 aa, synthetic construct
RTYDAMG

SEQ ID NO: 546 - protein, 9 aa, synthetic construct
SISSIDYMG

SEQ ID NO: 547 - protein, 9 aa, synthetic construct
GTFSFYNMG

SEQ ID NO: 548 - protein, 9 aa, synthetic construct
FIGNYHAMG

SEQ ID NO: 549 - protein, 9 aa, synthetic construct
SSLDAYGMG

SEQ ID NO: 550 - protein, 9 aa, synthetic construct
SIASIHAMG

SEQ ID NO: 551 - protein, 9 aa, synthetic construct
FTPDDYAMG

SEQ ID NO: 552 - protein, 9 aa, synthetic construct
GTFSVFAMG

SEQ ID NO: 553 - protein, 9 aa, synthetic construct
PISGINRMG

SEQ ID NO: 554 - protein, 9 aa, synthetic construct
TSIMVGAMG

SEQ ID NO: 555 - protein, 9 aa, synthetic construct
RTFSTHWMG

SEQ ID NO: 556 - protein, 8 aa, synthetic construct
TIFASAMG

SEQ ID NO: 557 - protein, 9 aa, synthetic construct
FPFSIWPMG

SEQ ID NO: 558 - protein, 9 aa, synthetic construct
RTFGNYAMG

SEQ ID NO: 559 - protein, 10 aa, synthetic construct
FLFDSYASMG

SEQ ID NO: 560 - protein, 9 aa, synthetic construct
LPFSTKSMG

SEQ ID NO: 561 - protein, 9 aa, synthetic construct
NIFRIETMG

SEQ ID NO: 562 - protein, 9 aa, synthetic construct
IPSSIRAMG

SEQ ID NO: 563 - protein, 9 aa, synthetic construct
FTLSGNWMG

SEQ ID NO: 564 - protein, 9 aa, synthetic construct
FTFSSLAMG

SEQ ID NO: 565 - protein, 8 aa, synthetic construct
TFGHYAMG

SEQ ID NO: 566 - protein, 9 aa, synthetic construct
IPFRSRTMG

SEQ ID NO: 567 - protein, 9 aa, synthetic construct
GTFSTSWMG

SEQ ID NO: 568 - protein, 9 aa, synthetic construct
GTFSLFAMG

SEQ ID NO: 569 - protein, 9 aa, synthetic construct
SSFSAYAMG

SEQ ID NO: 570 - protein, 9 aa, synthetic construct
RTSSPIAMG

SEQ ID NO: 571 - protein, 9 aa, synthetic construct
LTFNQYTMG

SEQ ID NO: 572 - protein, 7 aa, synthetic construct
PTFSSMG

SEQ ID NO: 573 - protein, 9 aa, synthetic construct
IPSTLRAMG

SEQ ID NO: 574 - protein, 10 aa, synthetic construct
GVGFSVTNMG

SEQ ID NO: 575 - protein, 9 aa, synthetic construct
GTFGSYGMG

SEQ ID NO: 576 - protein, 9 aa, synthetic construct
GTFSTYAMG

SEQ ID NO: 577 - protein, 9 aa, synthetic construct
PIYAVNRMG

SEQ ID NO: 578 - protein, 9 aa, synthetic construct
FTFSNYWMG

SEQ ID NO: 579 - protein, 9 aa, synthetic construct
GTFSAYHMG

SEQ ID NO: 580 - protein, 9 aa, synthetic construct
RTFSRLAMG

SEQ ID NO: 581 - protein, 8 aa, synthetic construct
SFSIAAMG

SEQ ID NO: 582 - protein, 9 aa, synthetic construct
RTFSRYAMG

SEQ ID NO: 583 - protein, 9 aa, synthetic construct
RTFSKYAMG

SEQ ID NO: 584 - protein, 9 aa, synthetic construct
RTFRRYAMG

SEQ ID NO: 585 - protein, 9 aa, synthetic construct
RTFSRFAMG

SEQ ID NO: 586 - protein, 12 aa, synthetic construct
LGIAFSRRTAMG

SEQ ID NO: 587 - protein, 9 aa, synthetic construct
RTFRRYPMG

SEQ ID NO: 588 - protein, 9 aa, synthetic construct
GTLRGYGMG

SEQ ID NO: 589 - protein, 9 aa, synthetic construct
RMFSSRSMG

SEQ ID NO: 590 - protein, 9 aa, synthetic construct
RTFGRRAMG

SEQ ID NO: 591 - protein, 12 aa, synthetic construct
LSSPPFDDFPMG

SEQ ID NO: 592 - protein, 9 aa, synthetic construct
GTFSSYSMG

SEQ ID NO: 593 - protein, 9 aa, synthetic construct
SIFSTRTMG

SEQ ID NO: 594 - protein, 9 aa, synthetic construct
RTLWRSNMG

SEQ ID NO: 595 - protein, 9 aa, synthetic construct
RSLGIYRMG

SEQ ID NO: 596 - protein, 9 aa, synthetic construct
TTLTFRIMG

SEQ ID NO: 597 - protein, 13 aa, synthetic construct
SRFSGRFNILNMG

SEQ ID NO: 598 - protein, 9 aa, synthetic construct
TLFKINAMG

SEQ ID NO: 599 - protein, 9 aa, synthetic construct
IPFRSRTMG

SEQ ID NO: 600 - protein, 9 aa, synthetic construct
FTFSSFRMG

SEQ ID NO: 601 - protein, 9 aa, synthetic construct
RNFRRNSMG

SEQ ID NO: 602 - protein, 9 aa, synthetic construct
RNLRMYRMG

SEQ ID NO: 603 - protein, 10 aa, synthetic construct
GLTFSSNTMG

SEQ ID NO: 604 - protein, 9 aa, synthetic construct
FTLAYYAMG

SEQ ID NO: 605 - protein, 9 aa, synthetic construct
RTFSSFPMG

SEQ ID NO: 606 - protein, 9 aa, synthetic construct
ISSSKRNMG

SEQ ID NO: 607 - protein, 9 aa, synthetic construct
RTFSIYAMG

SEQ ID NO: 608 - protein, 9 aa, synthetic construct
RMYNSYSMG

SEQ ID NO: 609 - protein, 9 aa, synthetic construct
RTFRSYGMG

SEQ ID NO: 610 - protein, 7 aa, synthetic construct
RTIRTMG

SEQ ID NO: 611 - protein, 9 aa, synthetic construct
RSFSFNAMG

SEQ ID NO: 612 - protein, 7 aa, synthetic construct
RTYYAMG

SEQ ID NO: 613 - protein, 9 aa, synthetic construct
RAFRRYTMG

SEQ ID NO: 614 - protein, 9 aa, synthetic construct
RTFSNYRMG

SEQ ID NO: 615 - protein, 9 aa, synthetic construct
ITFSPYAMG

SEQ ID NO: 616 - protein, 14 aa, synthetic construct
RTFSGFTMSSTWMG

SEQ ID NO: 617 - protein, 9 aa, synthetic construct
RTFRRYSMG

SEQ ID NO: 618 - protein, 8 aa, synthetic construct
SIFSIGMG

SEQ ID NO: 619 - protein, 9 aa, synthetic construct
RTFTSYRMG

SEQ ID NO: 620 - protein, 12 aa, synthetic construct
RTFSSFRFRAMG

SEQ ID NO: 621 - protein, 9 aa, synthetic construct
RTFGSYGMG

SEQ ID NO: 622 - protein, 9 aa, synthetic construct
RTFRSYPMG

SEQ ID NO: 623 - protein, 9 aa, synthetic construct
RTFSRSDMG

SEQ ID NO: 624 - protein, 9 aa, synthetic construct
RTFRRYTMG

SEQ ID NO: 625 - protein, 9 aa, synthetic construct
SIFRLSTMG

SEQ ID NO: 626 - protein, 9 aa, synthetic construct
IAFRIRTMG

SEQ ID NO: 627 - protein, 9 aa, synthetic construct
FTFTSYRMG

SEQ ID NO: 628 - protein, 9 aa, synthetic construct
RTFSRYVMG

SEQ ID NO: 629 - protein, 6 aa, synthetic construct
RTFSMG

SEQ ID NO: 630 - protein, 9 aa, synthetic construct
RTFSTYTMG

SEQ ID NO: 631 - protein, 9 aa, synthetic construct
RNLRMYRMG

SEQ ID NO: 632 - protein, 9 aa, synthetic construct
ITIRTHAMG

SEQ ID NO: 633 - protein, 9 aa, synthetic construct
RTFRRYHMG

SEQ ID NO: 634 - protein, 9 aa, synthetic construct
RTFRRYTMG

SEQ ID NO: 635 - protein, 9 aa, synthetic construct
RTFSWYPMG

SEQ ID NO: 636 - protein, 9 aa, synthetic construct
RTFTSYRMG

SEQ ID NO: 637 - protein, 9 aa, synthetic construct
RPLRRYVMG

SEQ ID NO: 638 - protein, 9 aa, synthetic construct
RTFRRYAMG

SEQ ID NO: 639 - protein, 9 aa, synthetic construct
RTFRRYTMG

SEQ ID NO: 640 - protein, 9 aa, synthetic construct
RTLSTYNMG

SEQ ID NO: 641 - protein, 9 aa, synthetic construct
RFFSTRVMG

SEQ ID NO: 642 - protein, 9 aa, synthetic construct
RFFSICSMG

SEQ ID NO: 643 - protein, 10 aa, synthetic construct
RMFSSRSNMG

SEQ ID NO: 644 - protein, 9 aa, synthetic construct
RTFSSARMG

SEQ ID NO: 645 - protein, 9 aa, synthetic construct
RTFRRYTMG

SEQ ID NO: 646 - protein, 9 aa, synthetic construct
HTFRNYGMG

SEQ ID NO: 647 - protein, 9 aa, synthetic construct
RTFSRYAMG

SEQ ID NO: 648 - protein, 9 aa, synthetic construct
RNLRMYRMG

SEQ ID NO: 649 - protein, 9 aa, synthetic construct
RTFRRYAMG

SEQ ID NO: 650 - protein, 8 aa, synthetic construct
IPASMYLG

SEQ ID NO: 651 - protein, 14 aa, synthetic construct
IPFRSRTFSAYAMG

SEQ ID NO: 652 - protein, 13 aa, synthetic construct
SAISGSGVSTYYA

SEQ ID NO: 653 - protein, 13 aa, synthetic construct
SAISGSGGNTYYA

SEQ ID NO: 654 - protein, 13 aa, synthetic construct
SAISGSGGSSYYA

SEQ ID NO: 655 - protein, 13 aa, synthetic construct
SAISGSGGSTHYA

SEQ ID NO: 656 - protein, 13 aa, synthetic construct
SAISGSGYSTYYA

SEQ ID NO: 657 - protein, 13 aa, synthetic construct
SAISGSGVSTYYA

SEQ ID NO: 658 - protein, 12 aa, synthetic construct
SAISGSGGSYYA

SEQ ID NO: 659 - protein, 13 aa, synthetic construct
SLISGSGGSTYYA

SEQ ID NO: 660 - protein, 13 aa, synthetic construct
SAISGSGGSTFYA

SEQ ID NO: 661 - protein, 13 aa, synthetic construct
SIISGSGGSTYYA

SEQ ID NO: 662 - protein, 13 aa, synthetic construct
STISGSGGSTYYA

SEQ ID NO: 663 - protein, 13 aa, synthetic construct
SAISGSAGSTYYA

SEQ ID NO: 664 - protein, 13 aa, synthetic construct
SAISGSGGTTYYA

SEQ ID NO: 665 - protein, 13 aa, synthetic construct
SAISGSGASTYYA

SEQ ID NO: 666 - protein, 12 aa, synthetic construct
SAISGSGATYYA

SEQ ID NO: 667 - protein, 13 aa, synthetic construct
SAISGSGGNTYYA

SEQ ID NO: 668 - protein, 13 aa, synthetic construct
SSISGSGGSTYYA

SEQ ID NO: 669 - protein, 13 aa, synthetic construct
SAISGSGVSTYYA

SEQ ID NO: 670 - protein, 13 aa, synthetic construct
SAISGSAGSTTMR

SEQ ID NO: 671 - protein, 13 aa, synthetic construct
SALSGSGGSTYYA

SEQ ID NO: 672 - protein, 13 aa, synthetic construct
SAISGSGGTTYYA

SEQ ID NO: 673 - protein, 12 aa, synthetic construct
SAISGSGGTYYA

SEQ ID NO: 674 - protein, 13 aa, synthetic construct
SAIRGSGGSTYYA

SEQ ID NO: 675 - protein, 13 aa, synthetic construct
SAIGGSGGSTYYA

SEQ ID NO: 676 - protein, 13 aa, synthetic construct
SAISVSGGSTYYA

SEQ ID NO: 677 - protein, 12 aa, synthetic construct
SAISGSGGTYYA

SEQ ID NO: 678 - protein, 12 aa, synthetic construct
SAISGSGRSTYY

SEQ ID NO: 679 - protein, 13 aa, synthetic construct
SAISGSGGSIYYA

SEQ ID NO: 680 - protein, 13 aa, synthetic construct
SIISGSGGSTYYA

SEQ ID NO: 681 - protein, 13 aa, synthetic construct
SAISGSGGRTYYA

SEQ ID NO: 682 - protein, 11 aa, synthetic construct
SAISGGTTYYA

SEQ ID NO: 683 - protein, 13 aa, synthetic construct
TAISVSGGSTYYA

SEQ ID NO: 684 - protein, 13 aa, synthetic construct
SAISGSSGSTYYA

SEQ ID NO: 685 - protein, 13 aa, synthetic construct
SAISASGGSTYYA

SEQ ID NO: 686 - protein, 13 aa, synthetic construct
SAIRGSGGSTYYA

SEQ ID NO: 687 - protein, 13 aa, synthetic construct
SAISGSGGATYYA

SEQ ID NO: 688 - protein, 11 aa, synthetic construct
ATWRPANTNYA

SEQ ID NO: 689 - protein, 13 aa, synthetic construct
AAISRTGGSTYYA

SEQ ID NO: 690 - protein, 13 aa, synthetic construct
AEIYPSGNGVYYA

SEQ ID NO: 691 - protein, 11 aa, synthetic construct
AAIARRERVYA

SEQ ID NO: 692 - protein, 12 aa, synthetic construct
AISWRTGTTYYA

SEQ ID NO: 693 - protein, 13 aa, synthetic construct
AGIWRSGVSLYYA

SEQ ID NO: 694 - protein, 12 aa, synthetic construct
AIIKSDGSTYYA

SEQ ID NO: 695 - protein, 13 aa, synthetic construct
SSIGIAGTPTLYA

SEQ ID NO: 696 - protein, 12 aa, synthetic construct
AAVINGGTTNYA

SEQ ID NO: 697 - protein, 12 aa, synthetic construct
GFTGSGRSQYYA

SEQ ID NO: 698 - protein, 13 aa, synthetic construct
AGIWEDSSAAHYA

SEQ ID NO: 699 - protein, 12 aa, synthetic construct
AGITSGGTRNYA

SEQ ID NO: 700 - protein, 13 aa, synthetic construct
AAISWGGGLTVYA

SEQ ID NO: 701 - protein, 12 aa, synthetic construct
ATVRSGSITNYA

SEQ ID NO: 702 - protein, 13 aa, synthetic construct
VAVTWSGGSTYYA

SEQ ID NO: 703 - protein, 13 aa, synthetic construct
AAISWSGESTLYA

SEQ ID NO: 704 - protein, 12 aa, synthetic construct
AAINRGGSTIYV

SEQ ID NO: 705 - protein, 13 aa, synthetic construct
SAISWNDGGADYA

SEQ ID NO: 706 - protein, 12 aa, synthetic construct
AFSSSGGSTYYA

SEQ ID NO: 707 - protein, 15 aa, synthetic construct
ATITEGGATNVGSTS

SEQ ID NO: 708 - protein, 12 aa, synthetic construct
GAITSSRSTVYA

SEQ ID NO: 709 - protein, 11 aa, synthetic construct
GGTRSGSTNYA

SEQ ID NO: 710 - protein, 13 aa, synthetic construct
AAVIGSSGTTYYA

SEQ ID NO: 711 - protein, 12 aa, synthetic construct
ASITYLGRTNYA

SEQ ID NO: 712 - protein, 13 aa, synthetic construct
AAINWSGARTYYA

SEQ ID NO: 713 - protein, 13 aa, synthetic construct
AAVSWSGSSTYYA

SEQ ID NO: 714 - protein, 13 aa, synthetic construct
AAISWSTGSTYYA

SEQ ID NO: 715 - protein, 11 aa, synthetic construct
SAISGGLAYYA

SEQ ID NO: 716 - protein, 12 aa, synthetic construct
ASITHQDRPIYA

SEQ ID NO: 717 - protein, 12 aa, synthetic construct
ASITYLGRTYYA

SEQ ID NO: 718 - protein, 13 aa, synthetic construct
AGITSSGGYTNYA

SEQ ID NO: 719 - protein, 13 aa, synthetic construct
SAISGSGGSTYYA

SEQ ID NO: 720 - protein, 13 aa, synthetic construct
SDIGGSGSTTYYA

SEQ ID NO: 721 - protein, 20 aa, synthetic construct
AGITRSAVSTITSEGTANYA

SEQ ID NO: 722 - protein, 13 aa, synthetic construct
SASSGSGGSTYYA

SEQ ID NO: 723 - protein, 12 aa, synthetic construct
AAISSGGSTNYA

SEQ ID NO: 724 - protein, 16 aa, synthetic construct
AAVRWSSTGIYYTQYA

SEQ ID NO: 725 - protein, 13 aa, synthetic construct
TAINWSGARTAYA

SEQ ID NO: 726 - protein, 13 aa, synthetic construct
SGISHNGGTTNYA

SEQ ID NO: 727 - protein, 13 aa, synthetic construct
AAISWDGGATAYA

SEQ ID NO: 728 - protein, 13 aa, synthetic construct
AEINWSGSSTYYA

SEQ ID NO: 729 - protein, 12 aa, synthetic construct
AAIHWSGLTSYA

SEQ ID NO: 730 - protein, 12 aa, synthetic construct
AAISPSAFTEYA

SEQ ID NO: 731 - protein, 13 aa, synthetic construct
AAISGWSGGTNYA

SEQ ID NO: 732 - protein, 12 aa, synthetic construct
AGISRGGTTNYA

SEQ ID NO: 733 - protein, 13 aa, synthetic construct
ASISRFFGTAYYA

SEQ ID NO: 734 - protein, 13 aa, synthetic construct
SAISGSGGSTDYA

SEQ ID NO: 735 - protein, 12 aa, synthetic construct
AAITSGGTPHYA

SEQ ID NO: 736 - protein, 12 aa, synthetic construct
ASITLGGSTAYA

SEQ ID NO: 737 - protein, 12 aa, synthetic construct
ASITSSGVNAYA

SEQ ID NO: 738 - protein, 13 aa, synthetic construct
AGISWNGGSTNYA

SEQ ID NO: 739 - protein, 12 aa, synthetic construct
ASITSGGSTAYA

SEQ ID NO: 740 - protein, 12 aa, synthetic construct
ASITSGGSTAYA

SEQ ID NO: 741 - protein, 12 aa, synthetic construct
AEIYPSGSTIYA

SEQ ID NO: 742 - protein, 13 aa, synthetic construct
STITGSGGSTNYA

SEQ ID NO: 743 - protein, 12 aa, synthetic construct
ASIEWDGSTYYA

SEQ ID NO: 744 - protein, 13 aa, synthetic construct
AGITSSGGYTNYA

SEQ ID NO: 745 - protein, 13 aa, synthetic construct
AEINWSGSSTYYA

SEQ ID NO: 746 - protein, 13 aa, synthetic construct
AILAWDSGSTYYA

SEQ ID NO: 747 - protein, 12 aa, synthetic construct
ASITSYGDTNYA

SEQ ID NO: 748 - protein, 12 aa, synthetic construct
ASISSQGRTNYA

SEQ ID NO: 749 - protein, 13 aa, synthetic construct
AAIHWNGDSTAYA

SEQ ID NO: 750 - protein, 12 aa, synthetic construct
AGVTRGGYTNYA

SEQ ID NO: 751 - protein, 12 aa, synthetic construct
AGISNGGTTNYA

SEQ ID NO: 752 - protein, 13 aa, synthetic construct
AFIHRSGGSTYYA

SEQ ID NO: 753 - protein, 13 aa, synthetic construct
AAVSWSGSSTYYA

SEQ ID NO: 754 - protein, 13 aa, synthetic construct
TAINWSGARAYYA

SEQ ID NO: 755 - protein, 13 aa, synthetic construct
AGITRSGSVTNYA

SEQ ID NO: 756 - protein, 13 aa, synthetic construct
SSIHWGGRGTNYA

SEQ ID NO: 757 - protein, 13 aa, synthetic construct
AAITWSGDSTNYA

SEQ ID NO: 758 - protein, 12 aa, synthetic construct
ASITKFGSTNYA

SEQ ID NO: 759 - protein, 12 aa, synthetic construct
ASISSRGITHYA

SEQ ID NO: 760 - protein, 12 aa, synthetic construct
AAITSGGTPHYG

SEQ ID NO: 761 - protein, 13 aa, synthetic construct
AAVSWSGSTTYYA

SEQ ID NO: 762 - protein, 13 aa, synthetic construct
AAITRGSNTTDYA

SEQ ID NO: 763 - protein, 12 aa, synthetic construct
ASITSGGSTNYA

SEQ ID NO: 764 - protein, 13 aa, synthetic construct
GAISRSGDSTYYA

SEQ ID NO: 765 - protein, 12 aa, synthetic construct
AGITSDDRTNYA

SEQ ID NO: 766 - protein, 13 aa, synthetic construct
AAISWSGGSTAYA

SEQ ID NO: 767 - protein, 10 aa, synthetic construct
AFIGSDTLYA

SEQ ID NO: 768 - protein, 12 aa, synthetic construct
AFISGNGGTSYA

SEQ ID NO: 769 - protein, 12 aa, synthetic construct
SAIDSEGRTSYA

SEQ ID NO: 770 - protein, 16 aa, synthetic construct
AAVRWSSTGIYYTQYA

SEQ ID NO: 771 - protein, 13 aa, synthetic construct
AAISWSGDITIYA

SEQ ID NO: 772 - protein, 13 aa, synthetic construct
AAISWSTGIAHYA

SEQ ID NO: 773 - protein, 13 aa, synthetic construct
AAVTWSGGTTNYA

SEQ ID NO: 774 - protein, 13 aa, synthetic construct
GGISWSGGNTYYA

SEQ ID NO: 775 - protein, 13 aa, synthetic construct
AAINWSAGYTAYA

SEQ ID NO: 776 - protein, 13 aa, synthetic construct
AAINWSGGTTRYA

SEQ ID NO: 777 - protein, 13 aa, synthetic construct
AAINWIAGYTADA

SEQ ID NO: 778 - protein, 13 aa, synthetic construct
AAINWSGGNTYYA

SEQ ID NO: 779 - protein, 13 aa, synthetic construct
AAINWTGGYTPYA

SEQ ID NO: 780 - protein, 13 aa, synthetic construct
AAINWSGGYTAYA

SEQ ID NO: 781 - protein, 13 aa, synthetic construct
GGINWSGGYTYYA

SEQ ID NO: 782 - protein, 13 aa, synthetic construct
AAINWSGGYTHYA

SEQ ID NO: 783 - protein, 13 aa, synthetic construct
AAIHWSGSSTRYA

SEQ ID NO: 784 - protein, 13 aa, synthetic construct
APINWSGGSTYYA

SEQ ID NO: 785 - protein, 13 aa, synthetic construct
AAINWSGGNTPYA

SEQ ID NO: 786 - protein, 13 aa, synthetic construct
AAINWSGDNTHYA

SEQ ID NO: 787 - protein, 13 aa, synthetic construct
AAINWSGGTTRYA

SEQ ID NO: 788 - protein, 13 aa, synthetic construct
AAINWSGDSTYYA

SEQ ID NO: 789 - protein, 13 aa, synthetic construct
AAINWSGGYTYYA

SEQ ID NO: 790 - protein, 13 aa, synthetic construct
AAINWSGGNTDYA

SEQ ID NO: 791 - protein, 13 aa, synthetic construct
AAINWSGGYTPYA

SEQ ID NO: 792 - protein, 13 aa, synthetic construct
AAINWSGGSTYYA

SEQ ID NO: 793 - protein, 13 aa, synthetic construct
AAIHWSAGYTRYA

SEQ ID NO: 794 - protein, 13 aa, synthetic construct
AGMTWSGSSTFYA

SEQ ID NO: 795 - protein, 13 aa, synthetic construct
AAINWSGDNTHYA

SEQ ID NO: 796 - protein, 13 aa, synthetic construct
AGISWNGGSIYYA

SEQ ID NO: 797 - protein, 13 aa, synthetic construct
AAINWSGGTTYYA

SEQ ID NO: 798 - protein, 12 aa, synthetic construct
SAVDSGGSTYYA

SEQ ID NO: 799 - protein, 13 aa, synthetic construct
AAVNWSGGSTYYA

SEQ ID NO: 800 - protein, 13 aa, synthetic construct
AAINWSAGYTAYA

SEQ ID NO: 801 - protein, 13 aa, synthetic construct
AAINWNGGNTHYA

SEQ ID NO: 802 - protein, 13 aa, synthetic construct
AAINWSGGYTYYA

SEQ ID NO: 803 - protein, 13 aa, synthetic construct
AAINWTGGYTYYA

SEQ ID NO: 804 - protein, 13 aa, synthetic construct
AAINWSAGYTAYA

SEQ ID NO: 805 - protein, 13 aa, synthetic construct
AAISWRGGTTYYA

SEQ ID NO: 806 - protein, 13 aa, synthetic construct
AGINWESGSTNYA

SEQ ID NO: 807 - protein, 13 aa, synthetic construct
AAINWSADYTAYA

SEQ ID NO: 808 - protein, 13 aa, synthetic construct
AAITRSGSSTVYA

SEQ ID NO: 809 - protein, 13 aa, synthetic construct
AAINWSAGYTAYA

SEQ ID NO: 810 - protein, 13 aa, synthetic construct
ATINWSGALTHYA

SEQ ID NO: 811 - protein, 13 aa, synthetic construct
AAITWSGGRTRYA

SEQ ID NO: 812 - protein, 13 aa, synthetic construct
ARILWTGASRNYA

SEQ ID NO: 813 - protein, 13 aa, synthetic construct
AGINWSGNGVYYA

SEQ ID NO: 814 - protein, 13 aa, synthetic construct
AAINWSGGTTPYA

SEQ ID NO: 815 - protein, 13 aa, synthetic construct
AAINWSGGYTPYA

SEQ ID NO: 816 - protein, 13 aa, synthetic construct
AAINWSGGSTDYA

SEQ ID NO: 817 - protein, 13 aa, synthetic construct
AAINWSAGYTAYA

SEQ ID NO: 818 - protein, 13 aa, synthetic construct
AAINWSGGSTRYA

SEQ ID NO: 819 - protein, 13 aa, synthetic construct
AAINWSAGYTPYA

SEQ ID NO: 820 - protein, 13 aa, synthetic construct
AAINWNAGYTAYA

SEQ ID NO: 821 - protein, 13 aa, synthetic construct
GRINWSGGNTYYA

SEQ ID NO: 822 - protein, 13 aa, synthetic construct
AAINWSAGYTAYA

SEQ ID NO: 823 - protein, 13 aa, synthetic construct
AVVNWSGRRTYYA

SEQ ID NO: 824 - protein, 13 aa, synthetic construct
SIISGSGGATYYA

SEQ ID NO: 825 - protein, 13 aa, synthetic construct
SGISGSGDETYYA

SEQ ID NO: 826 - protein, 13 aa, synthetic construct
SAISGSGDITYYA

SEQ ID NO: 827 - protein, 13 aa, synthetic construct
SAITGTGDITYYA

SEQ ID NO: 828 - protein, 13 aa, synthetic construct
SAISGSGDITYYA

SEQ ID NO: 829 - protein, 13 aa, synthetic construct
SAISGSGDITYYA

SEQ ID NO: 830 - protein, 13 aa, synthetic construct
SAITGSGDITYYA

SEQ ID NO: 831 - protein, 13 aa, synthetic construct
SAISGSGDITYYA

SEQ ID NO: 832 - protein, 13 aa, synthetic construct
STISGSGSTTYYA

SEQ ID NO: 833 - protein, 13 aa, synthetic construct
SAITASGDITYYA

SEQ ID NO: 834 - protein, 13 aa, synthetic construct
STISGSGGNTFYA

SEQ ID NO: 835 - protein, 13 aa, synthetic construct
STISGSGGITFYA

SEQ ID NO: 836 - protein, 13 aa, synthetic construct
SAISGSGDNTYYA

SEQ ID NO: 837 - protein, 13 aa, synthetic construct
SAITGSGDITYYA

SEQ ID NO: 838 - protein, 13 aa, synthetic construct
STISGSGGITFYA

SEQ ID NO: 839 - protein, 13 aa, synthetic construct
AAISGSGGSTYYA

SEQ ID NO: 840 - protein, 13 aa, synthetic construct
SAISGSGGSTNYA

SEQ ID NO: 841 - protein, 13 aa, synthetic construct
SGISGSGGTTYYG

SEQ ID NO: 842 - protein, 13 aa, synthetic construct
SGISGSGGTTYYG

SEQ ID NO: 843 - protein, 13 aa, synthetic construct
SGISGSGAGTYYA

SEQ ID NO: 844 - protein, 13 aa, synthetic construct
SGISGAGASTYYA

SEQ ID NO: 845 - protein, 13 aa, synthetic construct
SGISGSGASTYYA

SEQ ID NO: 846 - protein, 13 aa, synthetic construct
SGISGSGASTYYA

SEQ ID NO: 847 - protein, 13 aa, synthetic construct
SGISGSGAGTYYA

SEQ ID NO: 848 - protein, 13 aa, synthetic construct
SSISGGGASTYYA

SEQ ID NO: 849 - protein, 13 aa, synthetic construct
SSISGGGASTYYA

SEQ ID NO: 850 - protein, 13 aa, synthetic construct
SSISGGGASTYYA

SEQ ID NO: 851 - protein, 13 aa, synthetic construct
SSISGGGASTYYA

SEQ ID NO: 852 - protein, 13 aa, synthetic construct
SSISGGGASTYYA

SEQ ID NO: 853 - protein, 13 aa, synthetic construct
SAISGSGGSRYYA

SEQ ID NO: 854 - protein, 13 aa, synthetic construct
SIISGSGGATYYA

SEQ ID NO: 855 - protein, 13 aa, synthetic construct
SAITASGDITYYA

SEQ ID NO: 856 - protein, 13 aa, synthetic construct
SAISGSGDITYYA

SEQ ID NO: 857 - protein, 13 aa, synthetic construct
SGISGSGDETYYA

SEQ ID NO: 858 - protein, 13 aa, synthetic construct
SAISGSGDITYYA

SEQ ID NO: 859 - protein, 13 aa, synthetic construct
STISGSGGNTFYA

SEQ ID NO: 860 - protein, 13 aa, synthetic construct
SAITGSGDITYYA

SEQ ID NO: 861 - protein, 13 aa, synthetic construct
STISGSGGITFYA

SEQ ID NO: 862 - protein, 13 aa, synthetic construct
SAISGSGDNTYYA

SEQ ID NO: 863 - protein, 13 aa, synthetic construct
SAITGTGDITYYA

SEQ ID NO: 864 - protein, 13 aa, synthetic construct
SAITGSGDITYYA

SEQ ID NO: 865 - protein, 13 aa, synthetic construct
SAISGSGDITYYA

SEQ ID NO: 866 - protein, 13 aa, synthetic construct
SAISGSGDITYYA

SEQ ID NO: 867 - protein, 13 aa, synthetic construct
STISGSGSTTYYA

SEQ ID NO: 868 - protein, 13 aa, synthetic construct
SVISGSGGSTYYA

SEQ ID NO: 869 - protein, 13 aa, synthetic construct
SAISGSAGSTYYA

SEQ ID NO: 870 - protein, 13 aa, synthetic construct
SAISGSAGSTYYA

SEQ ID NO: 871 - protein, 13 aa, synthetic construct
SVISGSGGSTYYA

SEQ ID NO: 872 - protein, 13 aa, synthetic construct
SVISGSGGSTYYA

SEQ ID NO: 873 - protein, 13 aa, synthetic construct
STISGSGSTTYYA

SEQ ID NO: 874 - protein, 13 aa, synthetic construct
SGISGSGDETYYA

SEQ ID NO: 875 - protein, 13 aa, synthetic construct
SGITGSGDETYYA

SEQ ID NO: 876 - protein, 13 aa, synthetic construct
SAISGSGGSSYYA

SEQ ID NO: 877 - protein, 13 aa, synthetic construct
SGISGGGASTYYA

SEQ ID NO: 878 - protein, 13 aa, synthetic construct
SSIGGSGSTTYYA

SEQ ID NO: 879 - protein, 13 aa, synthetic construct
SAISGSSGSTYYA

SEQ ID NO: 880 - protein, 13 aa, synthetic construct
STISGSGGNTFYA

SEQ ID NO: 881 - protein, 13 aa, synthetic construct
SSISGGGASTYYA

SEQ ID NO: 882 - protein, 13 aa, synthetic construct
SAISGSGGSRYYA

SEQ ID NO: 883 - protein, 13 aa, synthetic construct
AAISGSGGSTYYA

SEQ ID NO: 884 - protein, 13 aa, synthetic construct
SGISGSGGTTYYG

SEQ ID NO: 885 - protein, 13 aa, synthetic construct
SGISGAGASTYYA

SEQ ID NO: 886 - protein, 13 aa, synthetic construct
SGISGSGGTTYYG

SEQ ID NO: 887 - protein, 13 aa, synthetic construct
SSISGGGASTYYA

SEQ ID NO: 888 - protein, 13 aa, synthetic construct
SGISGSGASTYYA

SEQ ID NO: 889 - protein, 13 aa, synthetic construct
SGISGSGAGTYYA

SEQ ID NO: 890 - protein, 13 aa, synthetic construct
SSISGGGASTYYA

SEQ ID NO: 891 - protein, 13 aa, synthetic construct
SGISGSGASTYYA

SEQ ID NO: 892 - protein, 13 aa, synthetic construct
SAISGSGGSTNYA

SEQ ID NO: 893 - protein, 13 aa, synthetic construct
SSISGGGASTYYA

SEQ ID NO: 894 - protein, 13 aa, synthetic construct
SSISGGGASTYYA

SEQ ID NO: 895 - protein, 13 aa, synthetic construct
SGISGSGAGTYYA

SEQ ID NO: 896 - protein, 13 aa, synthetic construct
SAISGRGGGTYYA

SEQ ID NO: 897 - protein, 13 aa, synthetic construct
STISGSGGITYYA

SEQ ID NO: 898 - protein, 13 aa, synthetic construct
SAISGSGVDTYYA

SEQ ID NO: 899 - protein, 13 aa, synthetic construct
STISTSGGNTYYA

SEQ ID NO: 900 - protein, 13 aa, synthetic construct
SGISVSGGFTYYA

SEQ ID NO: 901 - protein, 13 aa, synthetic construct
SGISGGGVSTYYA

SEQ ID NO: 902 - protein, 10 aa, synthetic construct
SAISGSAFYA

SEQ ID NO: 903 - protein, 13 aa, synthetic construct
SDISGSGGSTYYA

SEQ ID NO: 904 - protein, 13 aa, synthetic construct
SFISGSGGSTYYA

SEQ ID NO: 905 - protein, 13 aa, synthetic construct
SAISESGGSTYYA

SEQ ID NO: 906 - protein, 13 aa, synthetic construct
SAITGSGGSTYYG

SEQ ID NO: 907 - protein, 13 aa, synthetic construct
SGISGGGTSTYYA

SEQ ID NO: 908 - protein, 13 aa, synthetic construct
SAISGSVGSTYYA

SEQ ID NO: 909 - protein, 13 aa, synthetic construct
SAISGSGSNIYYA

SEQ ID NO: 910 - protein, 13 aa, synthetic construct
ARISTSGGSTKYA

SEQ ID NO: 911 - protein, 13 aa, synthetic construct
ARITWNGGSTYYA

SEQ ID NO: 912 - protein, 13 aa, synthetic construct
AAVSWSGSGVYYA

SEQ ID NO: 913 - protein, 13 aa, synthetic construct
GAVSWSGGTTVYA

SEQ ID NO: 914 - protein, 13 aa, synthetic construct
AAINWSAGYTAYA

SEQ ID NO: 915 - protein, 15 aa, synthetic construct
AAISWSGGSTYTAYA

SEQ ID NO: 916 - protein, 13 aa, synthetic construct
ARILWTGASRNYA

SEQ ID NO: 917 - protein, 13 aa, synthetic construct
AAISWNGDFTAYA

SEQ ID NO: 918 - protein, 13 aa, synthetic construct
AGINWESGSTNYA

SEQ ID NO: 919 - protein, 12 aa, synthetic construct
AAIGSGGYTDYA

SEQ ID NO: 920 - protein, 12 aa, synthetic construct
SAVDSGGSTYYA

SEQ ID NO: 921 - protein, 13 aa, synthetic construct
AAVTWSGGSTYYA

SEQ ID NO: 922 - protein, 13 aa, synthetic construct
AAINWSAGYTPYA

SEQ ID NO: 923 - protein, 13 aa, synthetic construct
AAIHWSAGYTRYA

SEQ ID NO: 924 - protein, 13 aa, synthetic construct
AAINWSADYTPYA

SEQ ID NO: 925 - protein, 13 aa, synthetic construct
AAINWSAGYTAYA

SEQ ID NO: 926 - protein, 13 aa, synthetic construct
AAINWSGGSTDYA

SEQ ID NO: 927 - protein, 13 aa, synthetic construct
AGINWSGGNTYYA

SEQ ID NO: 928 - protein, 13 aa, synthetic construct
AAINWTGGYTSYA

SEQ ID NO: 929 - protein, 13 aa, synthetic construct
AAINWSGGNTYYA

SEQ ID NO: 930 - protein, 13 aa, synthetic construct
AAINWSGGYTYYA

SEQ ID NO: 931 - protein, 13 aa, synthetic construct
ATINWSGALTHYA

SEQ ID NO: 932 - protein, 13 aa, synthetic construct
AGVTWSGSSTFYA

SEQ ID NO: 933 - protein, 13 aa, synthetic construct
AAISWSGGNTHYA

SEQ ID NO: 934 - protein, 13 aa, synthetic construct
AAINWSAGYTAYA

SEQ ID NO: 935 - protein, 13 aa, synthetic construct
AAVSGSGDDTYYA

SEQ ID NO: 936 - protein, 13 aa, synthetic construct
AAINWSAGYTAYA

SEQ ID NO: 937 - protein, 13 aa, synthetic construct
AAINWSGGYTPYA

SEQ ID NO: 938 - protein, 13 aa, synthetic construct
AAINWSAGYTPYA

SEQ ID NO: 939 - protein, 13 aa, synthetic construct
AAISWSGGTTRYA

SEQ ID NO: 940 - protein, 13 aa, synthetic construct
AAINWSGDSTYYA

SEQ ID NO: 941 - protein, 13 aa, synthetic construct
AAINWSGGTTRYA

SEQ ID NO: 942 - protein, 13 aa, synthetic construct
AAIHWSGSSTRYA

SEQ ID NO: 943 - protein, 13 aa, synthetic construct
GTINWSGGSTYYA

SEQ ID NO: 944 - protein, 13 aa, synthetic construct
AAINWSGGYTPYA

SEQ ID NO: 945 - protein, 13 aa, synthetic construct
AAINWNGGNTHYA

SEQ ID NO: 946 - protein, 13 aa, synthetic construct
AAINWSGGTTRYA

SEQ ID NO: 947 - protein, 13 aa, synthetic construct
AAINWSAGYTPYA

SEQ ID NO: 948 - protein, 13 aa, synthetic construct
ASINWSGGSTYYA

SEQ ID NO: 949 - protein, 13 aa, synthetic construct
AGISWNGGSIYYA

SEQ ID NO: 950 - protein, 13 aa, synthetic construct
AAISWRGGTTYYA

SEQ ID NO: 951 - protein, 13 aa, synthetic construct
AAINWSGGYTPYA

SEQ ID NO: 952 - protein, 13 aa, synthetic construct
AAINWSGGSTRYA

SEQ ID NO: 953 - protein, 13 aa, synthetic construct
AVINWSGGSTDYA

SEQ ID NO: 954 - protein, 13 aa, synthetic construct
AAINWSGGTTPYA

SEQ ID NO: 955 - protein, 13 aa, synthetic construct
AAVSWSGGNTYYA

SEQ ID NO: 956 - protein, 13 aa, synthetic construct
AAINWTGGYTPYA

SEQ ID NO: 957 - protein, 13 aa, synthetic construct
ATINWTAGYTYYA

SEQ ID NO: 958 - protein, 13 aa, synthetic construct
AAINWSGGNTDYA

SEQ ID NO: 959 - protein, 13 aa, synthetic construct
AAINWSGGNTYYA

SEQ ID NO: 960 - protein, 13 aa, synthetic construct
AGINWSGNGVYYA

SEQ ID NO: 961 - protein, 13 aa, synthetic construct
APINWSGGSTYYA

SEQ ID NO: 962 - protein, 13 aa, synthetic construct
AVVNWSGRRTYYA

SEQ ID NO: 963 - protein, 13 aa, synthetic construct
AAITRSGSSTVYA

SEQ ID NO: 964 - protein, 13 aa, synthetic construct
AAINWTGGSTYYA

SEQ ID NO: 965 - protein, 13 aa, synthetic construct
AAINWSAGYTAYA

SEQ ID NO: 966 - protein, 13 aa, synthetic construct
GSINWSGGSTYYA

SEQ ID NO: 967 - protein, 13 aa, synthetic construct
AGMTWSGSSTFYA

SEQ ID NO: 968 - protein, 13 aa, synthetic construct
AAINWSGDYTDYA

SEQ ID NO: 969 - protein, 13 aa, synthetic construct
GGINWSGGYTYYA

SEQ ID NO: 970 - protein, 13 aa, synthetic construct
AAVNWSGGSTYYA

SEQ ID NO: 971 - protein, 13 aa, synthetic construct
AAINWSGGYTRYA

SEQ ID NO: 972 - protein, 13 aa, synthetic construct
AAINWSGGYTPYA

SEQ ID NO: 973 - protein, 13 aa, synthetic construct
AAINWSAGYTAYA

SEQ ID NO: 974 - protein, 13 aa, synthetic construct
AAINWSGGYTHYA

SEQ ID NO: 975 - protein, 13 aa, synthetic construct
AAITWSGGRTRYA

SEQ ID NO: 976 - protein, 13 aa, synthetic construct
AAINWSGGYTAYA

SEQ ID NO: 977 - protein, 13 aa, synthetic construct
AAIHWSGSSTRYA

SEQ ID NO: 978 - protein, 13 aa, synthetic construct
AAINWSGGTTYYA

SEQ ID NO: 979 - protein, 13 aa, synthetic construct
AAINWSGDNTHYA

SEQ ID NO: 980 - protein, 12 aa, synthetic construct
ASISSGGTTAYA

SEQ ID NO: 981 - protein, 13 aa, synthetic construct
GRINWSGGNTYYA

SEQ ID NO: 982 - protein, 13 aa, synthetic construct
GGISWSGGNTYYA

SEQ ID NO: 983 - protein, 13 aa, synthetic construct
AAINWSGGSTYYA

SEQ ID NO: 984 - protein, 13 aa, synthetic construct
AAINWSGGYTYYA

SEQ ID NO: 985 - protein, 13 aa, synthetic construct
AAINWSADYTAYA

SEQ ID NO: 986 - protein, 13 aa, synthetic construct
AAINWSGSSTYYA

SEQ ID NO: 987 - protein, 13 aa, synthetic construct
AAINWIAGYTADA

SEQ ID NO: 988 - protein, 13 aa, synthetic construct
AAINWSGGNTPYA

SEQ ID NO: 989 - protein, 13 aa, synthetic construct
AAINWSGDNTHYA

SEQ ID NO: 990 - protein, 13 aa, synthetic construct
AAINWSAGYTAYA

SEQ ID NO: 991 - protein, 13 aa, synthetic construct
AAINWNAGYTAYA

SEQ ID NO: 992 - protein, 13 aa, synthetic construct
AAINWTGGYTYYA

SEQ ID NO: 993 - protein, 13 aa, synthetic construct
AAINWSAGYTAYA

SEQ ID NO: 994 - protein, 13 aa, synthetic construct
AAINWSGDNTHYA

SEQ ID NO: 995 - protein, 13 aa, synthetic construct
AAINWSAGYTPYA

SEQ ID NO: 996 - protein, 13 aa, synthetic construct
AAINWSAGYTAYA

SEQ ID NO: 997 - protein, 13 aa, synthetic construct
AAINWSGGNTYYA

SEQ ID NO: 998 - protein, 13 aa, synthetic construct
AAVSSLGPFTRYA

SEQ ID NO: 999 - protein, 13 aa, synthetic construct
AAINWSGGSTYYA

SEQ ID NO: 1000 - protein, 13 aa, synthetic construct
ARILWTGASRSYA

SEQ ID NO: 1001 - protein, 13 aa, synthetic construct
AAINMSGDDSAYA

SEQ ID NO: 1002 - protein, 10 aa, synthetic construct
ARISGSTFYA

SEQ ID NO: 1003 - protein, 13 aa, synthetic construct
GRINWSGGNTYYA

SEQ ID NO: 1004 - protein, 13 aa, synthetic construct
AAITWSGGSTAYA

SEQ ID NO: 1005 - protein, 13 aa, synthetic construct
AAITDNGGSKYYA

SEQ ID NO: 1006 - protein, 13 aa, synthetic construct
AAINWSGASTYYA

SEQ ID NO: 1007 - protein, 13 aa, synthetic construct
AAISWSEDNTYYA

SEQ ID NO: 1008 - protein, 13 aa, synthetic construct
AAVSGSGDDTYYA

SEQ ID NO: 1009 - protein, 13 aa, synthetic construct
AAISASGRRTDYA

SEQ ID NO: 1010 - protein, 12 aa, synthetic construct
AAISTGGSTIYA

SEQ ID NO: 1011 - protein, 13 aa, synthetic construct
AAISNSGLSTYYA

SEQ ID NO: 1012 - protein, 13 aa, synthetic construct
ATMRWSTGSTYYA

SEQ ID NO: 1013 - protein, 12 aa, synthetic construct
AAINNFGTTKYA

SEQ ID NO: 1014 - protein, 13 aa, synthetic construct
AAISWSGGSTAYA

SEQ ID NO: 1015 - protein, 13 aa, synthetic construct
AGINWSGDTPYYA

SEQ ID NO: 1016 - protein, 13 aa, synthetic construct
ASINWGGGNTYYA

SEQ ID NO: 1017 - protein, 13 aa, synthetic construct
AAISWSGDNTHYA

SEQ ID NO: 1018 - protein, 12 aa, synthetic construct
ATINGDDYTYYA

SEQ ID NO: 1019 - protein, 13 aa, synthetic construct
AAIRWSSSSTVYA

SEQ ID NO: 1020 - protein, 12 aa, synthetic construct
AAITSGGSTNYA

SEQ ID NO: 1021 - protein, 13 aa, synthetic construct
AAIHWNGDSTAYA

SEQ ID NO: 1022 - protein, 13 aa, synthetic construct
AAISGSGGSTAYA

SEQ ID NO: 1023 - protein, 12 aa, synthetic construct
AAITSSGSTNYA

SEQ ID NO: 1024 - protein, 13 aa, synthetic construct
ASINWGGGNTIYA

SEQ ID NO: 1025 - protein, 13 aa, synthetic construct
AAVSSLGPFTRYA

SEQ ID NO: 1026 - protein, 12 aa, synthetic construct
AAITNGGSTYYA

SEQ ID NO: 1027 - protein, 12 aa, synthetic construct
AAIDWDGSTAYA

SEQ ID NO: 1028 - protein, 12 aa, synthetic construct
AYYTSGGSIDYA

SEQ ID NO: 1029 - protein, 13 aa, synthetic construct
AAISSSGSSTVYA

SEQ ID NO: 1030 - protein, 13 aa, synthetic construct
ATITWSGDSTYYA

SEQ ID NO: 1031 - protein, 13 aa, synthetic construct
SAISWSTGSTYYA

SEQ ID NO: 1032 - protein, 13 aa, synthetic construct
AAISMSGDDTIYA

SEQ ID NO: 1033 - protein, 13 aa, synthetic construct
AVINWSGARTYYA

SEQ ID NO: 1034 - protein, 13 aa, synthetic construct
AAINWSGGSTAYA

SEQ ID NO: 1035 - protein, 13 aa, synthetic construct
GAIHWSGGRTYYA

SEQ ID NO: 1036 - protein, 13 aa, synthetic construct
AAINWSGARTAYA

SEQ ID NO: 1037 - protein, 13 aa, synthetic construct
AAISSRDGSTIYA

SEQ ID NO: 1038 - protein, 17 aa, synthetic construct
AAISIASGASGGTTNYA

SEQ ID NO: 1039 - protein, 13 aa, synthetic construct
ARITWNGGSTFYA

SEQ ID NO: 1040 - protein, 13 aa, synthetic construct
AAISWLGESTYYA

SEQ ID NO: 1041 - protein, 13 aa, synthetic construct
AAINWNGGYTAYA

SEQ ID NO: 1042 - protein, 15 aa, synthetic construct
AAISWTGVSTYTAYA

SEQ ID NO: 1043 - protein, 13 aa, synthetic construct
AAISWSGVGTAYA

SEQ ID NO: 1044 - protein, 13 aa, synthetic construct
GAINWLSESTYYA

SEQ ID NO: 1045 - protein, 13 aa, synthetic construct
AAINWSGGSTYYA

SEQ ID NO: 1046 - protein, 13 aa, synthetic construct
AAISMSGDDAAYA

SEQ ID NO: 1047 - protein, 13 aa, synthetic construct
AAISSRDGSTAYA

SEQ ID NO: 1048 - protein, 13 aa, synthetic construct
AAISWDGGATAYA

SEQ ID NO: 1049 - protein, 12 aa, synthetic construct
ASIRSGARTYYA

SEQ ID NO: 1050 - protein, 13 aa, synthetic construct
AAISWSGGSTVYA

SEQ ID NO: 1051 - protein, 13 aa, synthetic construct
AAISWDGGATAYA

SEQ ID NO: 1052 - protein, 12 aa, synthetic construct
AIKFSGGTTDYA

SEQ ID NO: 1053 - protein, 13 aa, synthetic construct
AGISWSGDSTLYA

SEQ ID NO: 1054 - protein, 13 aa, synthetic construct
AVITCSGGSTDYA

SEQ ID NO: 1055 - protein, 18 aa, synthetic construct
AEITEGGISPSGDNIYYA

SEQ ID NO: 1056 - protein, 12 aa, synthetic construct
AAINNFGTTKYA

SEQ ID NO: 1057 - protein, 12 aa, synthetic construct
AAIHSGGSTNYA

SEQ ID NO: 1058 - protein, 13 aa, synthetic construct
SSIHWGGRGTNYA

SEQ ID NO: 1059 - protein, 13 aa, synthetic construct
AHIPRSTYSPYYA

SEQ ID NO: 1060 - protein, 12 aa, synthetic construct
AAISSYSHTAYA

SEQ ID NO: 1061 - protein, 12 aa, synthetic construct
ASISSGGGINYA

SEQ ID NO: 1062 - protein, 12 aa, synthetic construct
AINRSTGSTSYA

SEQ ID NO: 1063 - protein, 12 aa, synthetic construct
AAIRSSGGLFYA

SEQ ID NO: 1064 - protein, 13 aa, synthetic construct
SAIRWNGGNTAYA

SEQ ID NO: 1065 - protein, 12 aa, synthetic construct
ATIRWTNSTDYA

SEQ ID NO: 1066 - protein, 12 aa, synthetic construct
AAIHSGGATVYA

SEQ ID NO: 1067 - protein, 13 aa, synthetic construct
AGIRWSDVYTQYA

SEQ ID NO: 1068 - protein, 13 aa, synthetic construct
AAIHWSGGSTIYA

SEQ ID NO: 1069 - protein, 13 aa, synthetic construct
ASINWSGGSTYYA

SEQ ID NO: 1070 - protein, 12 aa, synthetic construct
AAISPSAFTEYA

SEQ ID NO: 1071 - protein, 12 aa, synthetic construct
AHISTGGATNYA

SEQ ID NO: 1072 - protein, 13 aa, synthetic construct
AAINWSDSRTDYA

SEQ ID NO: 1073 - protein, 13 aa, synthetic construct
AAISWSGESTLYA

SEQ ID NO: 1074 - protein, 12 aa, synthetic construct
AAISSYSHTAYA

SEQ ID NO: 1075 - protein, 13 aa, synthetic construct
AAIHWSGDSTLYA

SEQ ID NO: 1076 - protein, 12 aa, synthetic construct
ARIYTGGDTIYA

SEQ ID NO: 1077 - protein, 12 aa, synthetic construct
ATITPGGNTNYA

SEQ ID NO: 1078 - protein, 12 aa, synthetic construct
AEITAGGSTYYA

SEQ ID NO: 1079 - protein, 12 aa, synthetic construct
ASVLRGGYTWYA

SEQ ID NO: 1080 - protein, 13 aa, synthetic construct
AGIRWTDAYTEYA

SEQ ID NO: 1081 - protein, 13 aa, synthetic construct
AVINWTGESTLYA

SEQ ID NO: 1082 - protein, 15 aa, synthetic construct
AALGWSGVTTYHYYA

SEQ ID NO: 1083 - protein, 13 aa, synthetic construct
ATIMWSGNTTYYA

SEQ ID NO: 1084 - protein, 14 aa, synthetic construct
AAISWSGGDNTYYA

SEQ ID NO: 1085 - protein, 13 aa, synthetic construct
AGISWNGGSTNYA

SEQ ID NO: 1086 - protein, 12 aa, synthetic construct
AAISCGGGSTYA

SEQ ID NO: 1087 - protein, 13 aa, synthetic construct
GGISRSGATTNYA

SEQ ID NO: 1088 - protein, 12 aa, synthetic construct
ASISSQGRTNYA

SEQ ID NO: 1089 - protein, 13 aa, synthetic construct
AGIRWTDAYTEYA

SEQ ID NO: 1090 - protein, 13 aa, synthetic construct
AAIHWSGLTTFYA

SEQ ID NO: 1091 - protein, 20 aa, synthetic construct
AWINNRGTTDYADSGSTYYA

SEQ ID NO: 1092 - protein, 16 aa, synthetic construct
ASIGYSGRSNSYNYYA

SEQ ID NO: 1093 - protein, 12 aa, synthetic construct
AAITSGGAPHYA

SEQ ID NO: 1094 - protein, 12 aa, synthetic construct
AAIHWSGLTSYA

SEQ ID NO: 1095 - protein, 13 aa, synthetic construct
AAISWSGESTQYA

SEQ ID NO: 1096 - protein, 15 aa, synthetic construct
AAIHWSGDSTHRNYA

SEQ ID NO: 1097 - protein, 13 aa, synthetic construct
TAINWSGARTAYA

SEQ ID NO: 1098 - protein, 13 aa, synthetic construct
AGIRWSDAYTEYA

SEQ ID NO: 1099 - protein, 13 aa, synthetic construct
ASISQSGAATAYA

SEQ ID NO: 1100 - protein, 12 aa, synthetic construct
AAITSGGTPHYA

SEQ ID NO: 1101 - protein, 12 aa, synthetic construct
ATITPGGNTNYA

SEQ ID NO: 1102 - protein, 13 aa, synthetic construct
ATITFSGARTAYA

SEQ ID NO: 1103 - protein, 12 aa, synthetic construct
AAIRRSAVTNYA

SEQ ID NO: 1104 - protein, 13 aa, synthetic construct
AVISWTGESTLYA

SEQ ID NO: 1105 - protein, 13 aa, synthetic construct
AAITWSGGWRYYA

SEQ ID NO: 1106 - protein, 12 aa, synthetic construct
ARIFGGDRTLYA

SEQ ID NO: 1107 - protein, 10 aa, synthetic construct
GCIGWITYYA

SEQ ID NO: 1108 - protein, 13 aa, synthetic construct
AGIRWTDAYTEYA

SEQ ID NO: 1109 - protein, 13 aa, synthetic construct
SCISNIDGSTYYA

SEQ ID NO: 1110 - protein, 13 aa, synthetic construct
AAIMWSGSHRNYA

SEQ ID NO: 1111 - protein, 12 aa, synthetic construct
TGISPSAFTEYA

SEQ ID NO: 1112 - protein, 13 aa, synthetic construct
TGINWSGGSTTYA

SEQ ID NO: 1113 - protein, 13 aa, synthetic construct
AALGWSGGSTDYA

SEQ ID NO: 1114 - protein, 12 aa, synthetic construct
ARIYTGGDTLYA

SEQ ID NO: 1115 - protein, 12 aa, synthetic construct
AAIDSDGSTDYA

SEQ ID NO: 1116 - protein, 13 aa, synthetic construct
AAINWNGGTTLYA

SEQ ID NO: 1117 - protein, 13 aa, synthetic construct
AGITSSVGVTNYA

SEQ ID NO: 1118 - protein, 13 aa, synthetic construct
AAISGSENVTSYA

SEQ ID NO: 1119 - protein, 12 aa, synthetic construct
ATINSLGGTSYA

SEQ ID NO: 1120 - protein, 11 aa, synthetic construct
TVISGVGTSYA

SEQ ID NO: 1121 - protein, 12 aa, synthetic construct
ATINEYGGRNYA

SEQ ID NO: 1122 - protein, 13 aa, synthetic construct
AAISRSGSLTSYA

SEQ ID NO: 1123 - protein, 12 aa, synthetic construct
ASTNSAGSTNYA

SEQ ID NO: 1124 - protein, 13 aa, synthetic construct
AAISWSGGSTAYA

SEQ ID NO: 1125 - protein, 12 aa, synthetic construct
ATINWSGVTAYA

SEQ ID NO: 1126 - protein, 12 aa, synthetic construct
AIITTGGRTTYA

SEQ ID NO: 1127 - protein, 12 aa, synthetic construct
SAIDSEGRTSYA

SEQ ID NO: 1128 - protein, 13 aa, synthetic construct
AAISRSGGFGSYA

SEQ ID NO: 1129 - protein, 13 aa, synthetic construct
ATIGWSGANTYYA

SEQ ID NO: 1130 - protein, 13 aa, synthetic construct
AAISGSENVTSYA

SEQ ID NO: 1131 - protein, 13 aa, synthetic construct
AHIPRSTYSPYYA

SEQ ID NO: 1132 - protein, 13 aa, synthetic construct
AAVSWDGRNTYYA

SEQ ID NO: 1133 - protein, 13 aa, synthetic construct
AAVRWSDDYTYYA

SEQ ID NO: 1134 - protein, 13 aa, synthetic construct
AHISWSGGSTYYA

SEQ ID NO: 1135 - protein, 12 aa, synthetic construct
AGVINDGSTVYA

SEQ ID NO: 1136 - protein, 13 aa, synthetic construct
AGMMWSGGTTTYA

SEQ ID NO: 1137 - protein, 13 aa, synthetic construct
AAISPSAVTTYYA

SEQ ID NO: 1138 - protein, 13 aa, synthetic construct
AAITWNGASTSYA

SEQ ID NO: 1139 - protein, 16 aa, synthetic construct
AAITSSGSNIDYTYYA

SEQ ID NO: 1140 - protein, 12 aa, synthetic construct
ATIHSSGSTSYA

SEQ ID NO: 1141 - protein, 13 aa, synthetic construct
ALINRSGGGINYA

SEQ ID NO: 1142 - protein, 13 aa, synthetic construct
AAINWSGDNTHYA

SEQ ID NO: 1143 - protein, 12 aa, synthetic construct
AAISRFGSTYYA

SEQ ID NO: 1144 - protein, 12 aa, synthetic construct
ATINTGGGTNYA

SEQ ID NO: 1145 - protein, 12 aa, synthetic construct
ASISRSGTTYYA

SEQ ID NO: 1146 - protein, 12 aa, synthetic construct
ATITSDDRTNYA

SEQ ID NO: 1147 - protein, 13 aa, synthetic construct
AAIIWTGESTLDA

SEQ ID NO: 1148 - protein, 12 aa, synthetic construct
ATINWSGVTAYA

SEQ ID NO: 1149 - protein, 13 aa, synthetic construct
ASITWSSANTYYA

SEQ ID NO: 1150 - protein, 13 aa, synthetic construct
ALISWSGGSTYYA

SEQ ID NO: 1151 - protein, 12 aa, synthetic construct
ATINTGGQPNYA

SEQ ID NO: 1152 - protein, 13 aa, synthetic construct
AHISWSSKSTYYA

SEQ ID NO: 1153 - protein, 13 aa, synthetic construct
AAISMSGDDTIYA

SEQ ID NO: 1154 - protein, 13 aa, synthetic construct
TAITWSGDSTNYA

SEQ ID NO: 1155 - protein, 12 aa, synthetic construct
ATINSLGGTNYA

SEQ ID NO: 1156 - protein, 12 aa, synthetic construct
AVISSLSSKSYA

SEQ ID NO: 1157 - protein, 13 aa, synthetic construct
AAISWSGGSTAYA

SEQ ID NO: 1158 - protein, 13 aa, synthetic construct
ARVWWNGGSAYYA

SEQ ID NO: 1159 - protein, 12 aa, synthetic construct
ASINEYGGRNYA

SEQ ID NO: 1160 - protein, 12 aa, synthetic construct
AVITSGGSTNYA

SEQ ID NO: 1161 - protein, 13 aa, synthetic construct
ASVNWDASQINYA

SEQ ID NO: 1162 - protein, 13 aa, synthetic construct
GRITWTDGSTYYA

SEQ ID NO: 1163 - protein, 13 aa, synthetic construct
TLISWSSGRTSYA

SEQ ID NO: 1164 - protein, 12 aa, synthetic construct
ALIRRDGSTIYA

SEQ ID NO: 1165 - protein, 12 aa, synthetic construct
ASITYGGNINYA

SEQ ID NO: 1166 - protein, 13 aa, synthetic construct
ASVNWSGGTTSYA

SEQ ID NO: 1167 - protein, 13 aa, synthetic construct
AAISWSPGRTDYA

SEQ ID NO: 1168 - protein, 12 aa, synthetic construct
ASLATGGNTNYA

SEQ ID NO: 1169 - protein, 12 aa, synthetic construct
AAISRFGSTYYA

SEQ ID NO: 1170 - protein, 12 aa, synthetic construct
AAITSGGSTVYA

SEQ ID NO: 1171 - protein, 12 aa, synthetic construct
AAISTGSVTIYA

SEQ ID NO: 1172 - protein, 12 aa, synthetic construct
AHITAGGLSNYA

SEQ ID NO: 1173 - protein, 12 aa, synthetic construct
ARITSGGSTGYA

SEQ ID NO: 1174 - protein, 13 aa, synthetic construct
AGITWNGDTTYYA

SEQ ID NO: 1175 - protein, 12 aa, synthetic construct
AAVPLSGNTYYA

SEQ ID NO: 1176 - protein, 13 aa, synthetic construct
AAISGSENVTSYA

SEQ ID NO: 1177 - protein, 13 aa, synthetic construct
SSIYSDGSNTYYA

SEQ ID NO: 1178 - protein, 13 aa, synthetic construct
ATISQSGAATAYA

SEQ ID NO: 1179 - protein, 13 aa, synthetic construct
AAINWSGGSTNYA

SEQ ID NO: 1180 - protein, 13 aa, synthetic construct
AVISWTGGSTYYA

SEQ ID NO: 1181 - protein, 12 aa, synthetic construct
AAIGSGGSTSYA

SEQ ID NO: 1182 - protein, 13 aa, synthetic construct
AAINWSHGVTYYA

SEQ ID NO: 1183 - protein, 12 aa, synthetic construct
ASLSIFGATGYA

SEQ ID NO: 1184 - protein, 12 aa, synthetic construct
AAISSGGSTDYA

SEQ ID NO: 1185 - protein, 13 aa, synthetic construct
AAISSSGALTSYA

SEQ ID NO: 1186 - protein, 12 aa, synthetic construct
AHITAGGLSNYA

SEQ ID NO: 1187 - protein, 12 aa, synthetic construct
AGISRSGGTYYA

SEQ ID NO: 1188 - protein, 13 aa, synthetic construct
AAIGWGGGSTRYA

SEQ ID NO: 1189 - protein, 15 aa, synthetic construct
AIITSSDTNDTTNYA

SEQ ID NO: 1190 - protein, 13 aa, synthetic construct
AAIDWSGGSTAYA

SEQ ID NO: 1191 - protein, 12 aa, synthetic construct
AVITREGSTYYA

SEQ ID NO: 1192 - protein, 12 aa, synthetic construct
AAITSGGSTDYA

SEQ ID NO: 1193 - protein, 13 aa, synthetic construct
AAISRSGGNTYYA

SEQ ID NO: 1194 - protein, 12 aa, synthetic construct
AAINSGGSTYYA

SEQ ID NO: 1195 - protein, 12 aa, synthetic construct
AAVTEGGTTSYA

SEQ ID NO: 1196 - protein, 12 aa, synthetic construct
ASVTSGGYTHYA

SEQ ID NO: 1197 - protein, 13 aa, synthetic construct
SWISSSDGSTYYA

SEQ ID NO: 1198 - protein, 12 aa, synthetic construct
AFISGNGGTSYA

SEQ ID NO: 1199 - protein, 13 aa, synthetic construct
AAVTWSGGTTNYA

SEQ ID NO: 1200 - protein, 13 aa, synthetic construct
AAISWGGGSIYYA

SEQ ID NO: 1201 - protein, 13 aa, synthetic construct
AAITWSGAITSYA

SEQ ID NO: 1202 - protein, 13 aa, synthetic construct
AAINSGGSYTYYA

SEQ ID NO: 1203 - protein, 13 aa, synthetic construct
SAINWSGGSLLYA

SEQ ID NO: 1204 - protein, 12 aa, synthetic construct
AVITSNGRPSYA

SEQ ID NO: 1205 - protein, 12 aa, synthetic construct
AIIRGDGRTSYA

SEQ ID NO: 1206 - protein, 13 aa, synthetic construct
AVINWSGGSIYYA

SEQ ID NO: 1207 - protein, 13 aa, synthetic construct
AVVNWNGSSTVYA

SEQ ID NO: 1208 - protein, 11 aa, synthetic construct
AAVRWSSTYYA

SEQ ID NO: 1209 - protein, 13 aa, synthetic construct
ASISSSGVSKHYA

SEQ ID NO: 1210 - protein, 15 aa, synthetic construct
ATIWRRGNTYYANYA

SEQ ID NO: 1211 - protein, 12 aa, synthetic construct
AAISMSGLTSYA

SEQ ID NO: 1212 - protein, 13 aa, synthetic construct
AGIIRSGGETLYA

SEQ ID NO: 1213 - protein, 13 aa, synthetic construct
AVIRWTGGSTYYA

SEQ ID NO: 1214 - protein, 12 aa, synthetic construct
AIITSGGRTNYA

SEQ ID NO: 1215 - protein, 13 aa, synthetic construct
AAITWSGDITNYA

SEQ ID NO: 1216 - protein, 13 aa, synthetic construct
AAINWSSRSTVYA

SEQ ID NO: 1217 - protein, 13 aa, synthetic construct
AGISRSGASTAYA

SEQ ID NO: 1218 - protein, 12 aa, synthetic construct
AHITAGGLSNYA

SEQ ID NO: 1219 - protein, 16 aa, synthetic construct
AAISWTGDSTYYKYYA

SEQ ID NO: 1220 - protein, 12 aa, synthetic construct
SAIDSEGTTTYA

SEQ ID NO: 1221 - protein, 12 aa, synthetic construct
AVRWSDDYTYYA

SEQ ID NO: 1222 - protein, 12 aa, synthetic construct
ASITDGGSTYYA

SEQ ID NO: 1223 - protein, 13 aa, synthetic construct
AAISWDGGATAYA

SEQ ID NO: 1224 - protein, 13 aa, synthetic construct
AATSWSGGSKYYA

SEQ ID NO: 1225 - protein, 12 aa, synthetic construct
AVISSSSSTNYA

SEQ ID NO: 1226 - protein, 13 aa, synthetic construct
AAIRWSGGITYYA

SEQ ID NO: 1227 - protein, 12 aa, synthetic construct
ASIDWSGLTSYA

SEQ ID NO: 1228 - protein, 13 aa, synthetic construct
AGIWRSGGHRDYA

SEQ ID NO: 1229 - protein, 13 aa, synthetic construct
GGISRSGVSTSYA

SEQ ID NO: 1230 - protein, 12 aa, synthetic construct
TIIDNGGPTSYA

SEQ ID NO: 1231 - protein, 13 aa, synthetic construct
AAISRSGRSTSYA

SEQ ID NO: 1232 - protein, 13 aa, synthetic construct
ATINYSGGGTYYA

SEQ ID NO: 1233 - protein, 13 aa, synthetic construct
AAISRSGKSTYYA

SEQ ID NO: 1234 - protein, 13 aa, synthetic construct
ALITPSSRTTYYA

SEQ ID NO: 1235 - protein, 13 aa, synthetic construct
ASINWGGGNTYYA

SEQ ID NO: 1236 - protein, 13 aa, synthetic construct
AAIRWSGGRTVYA

SEQ ID NO: 1237 - protein, 13 aa, synthetic construct
AAISWRGGNTYYA

SEQ ID NO: 1238 - protein, 13 aa, synthetic construct
AAISRSGGSTYYA

SEQ ID NO: 1239 - protein, 13 aa, synthetic construct
ASISRSGGSTYYA

SEQ ID NO: 1240 - protein, 13 aa, synthetic construct
ALINRSGGSQFYA

SEQ ID NO: 1241 - protein, 12 aa, synthetic construct
AGISRGGGTNYA

SEQ ID NO: 1242 - protein, 13 aa, synthetic construct
SSIYSDDGDSMYA

SEQ ID NO: 1243 - protein, 16 aa, synthetic construct
SAISWIIGSGGTTNYA

SEQ ID NO: 1244 - protein, 12 aa, synthetic construct
ASITKFGSTNYA

SEQ ID NO: 1245 - protein, 12 aa, synthetic construct
ASISSFGSTKYA

SEQ ID NO: 1246 - protein, 12 aa, synthetic construct
AAITSGGRKNYA

SEQ ID NO: 1247 - protein, 12 aa, synthetic construct
PAISSTGLASYT

SEQ ID NO: 1248 - protein, 13 aa, synthetic construct
ARIGYSGQSISYA

SEQ ID NO: 1249 - protein, 12 aa, synthetic construct
AQINRHGVTYYA

SEQ ID NO: 1250 - protein, 13 aa, synthetic construct
AGITGSGRSQYYA

SEQ ID NO: 1251 - protein, 12 aa, synthetic construct
AGISRGGSTNYA

SEQ ID NO: 1252 - protein, 13 aa, synthetic construct
AGISWSGARTHYA

SEQ ID NO: 1253 - protein, 13 aa, synthetic construct
ATIRWSDGSTYYA

SEQ ID NO: 1254 - protein, 12 aa, synthetic construct
ASISSSGRTSYA

SEQ ID NO: 1255 - protein, 13 aa, synthetic construct
AAISWSGRNINYA

SEQ ID NO: 1256 - protein, 12 aa, synthetic construct
AAISWSGSTSYA

SEQ ID NO: 1257 - protein, 12 aa, synthetic construct
ATWTSRGITTYA

SEQ ID NO: 1258 - protein, 12 aa, synthetic construct
ARITRGGITKYA

SEQ ID NO: 1259 - protein, 11 aa, synthetic construct
ARISPGGTFYA

SEQ ID NO: 1260 - protein, 12 aa, synthetic construct
ASISRSGTTMYA

SEQ ID NO: 1261 - protein, 12 aa, synthetic construct
ATINSRGITNYA

SEQ ID NO: 1262 - protein, 12 aa, synthetic construct
ARISRFGRTNYA

SEQ ID NO: 1263 - protein, 13 aa, synthetic construct
GAIDWSGRRITYA

SEQ ID NO: 1264 - protein, 12 aa, synthetic construct
ASITKFGSTNYA

SEQ ID NO: 1265 - protein, 12 aa, synthetic construct
ASINRGGSTKYA

SEQ ID NO: 1266 - protein, 13 aa, synthetic construct
ATINWSGGYTVYA

SEQ ID NO: 1267 - protein, 12 aa, synthetic construct
AGIITNGSTNYA

SEQ ID NO: 1268 - protein, 12 aa, synthetic construct
ASITPGGNTNYA

SEQ ID NO: 1269 - protein, 13 aa, synthetic construct
ARIWWRSGATYYA

SEQ ID NO: 1270 - protein, 13 aa, synthetic construct
AEISSSGGYTYYA

SEQ ID NO: 1271 - protein, 12 aa, synthetic construct
ALIFSGGSTYYA

SEQ ID NO: 1272 - protein, 12 aa, synthetic construct
ATISIGGRTYYA

SEQ ID NO: 1273 - protein, 12 aa, synthetic construct
ASINRGGSTNYA

SEQ ID NO: 1274 - protein, 13 aa, synthetic construct
AAISWSGGSTSYA

SEQ ID NO: 1275 - protein, 11 aa, synthetic construct
ASMRGSRSYYA

SEQ ID NO: 1276 - protein, 12 aa, synthetic construct
ASISSFGSTYYA

SEQ ID NO: 1277 - protein, 12 aa, synthetic construct
ASITSGGSTNYA

SEQ ID NO: 1278 - protein, 13 aa, synthetic construct
AGISRFFGTAYYA

SEQ ID NO: 1279 - protein, 12 aa, synthetic construct
ASISRFGRTNYA

SEQ ID NO: 1280 - protein, 12 aa, synthetic construct
ASISRFGRTNYA

SEQ ID NO: 1281 - protein, 13 aa, synthetic construct
ARIWRSGGNTYYA

SEQ ID NO: 1282 - protein, 12 aa, synthetic construct
ALISRVGVTSYA

SEQ ID NO: 1283 - protein, 13 aa, synthetic construct
ATISRSGGNTYYA

SEQ ID NO: 1284 - protein, 12 aa, synthetic construct
AAITSGGRTNYA

SEQ ID NO: 1285 - protein, 13 aa, synthetic construct
AVISWSGGSTKYA

SEQ ID NO: 1286 - protein, 13 aa, synthetic construct
ASISWGGARTYYA

SEQ ID NO: 1287 - protein, 13 aa, synthetic construct
AAITWNSGRTRYA

SEQ ID NO: 1288 - protein, 12 aa, synthetic construct
AAITNGGSTKYA

SEQ ID NO: 1289 - protein, 12 aa, synthetic construct
AAINRSGSTEYA

SEQ ID NO: 1290 - protein, 12 aa, synthetic construct
ASISRSGTTYYA

SEQ ID NO: 1291 - protein, 12 aa, synthetic construct
ASISRFGRTNYA

SEQ ID NO: 1292 - protein, 12 aa, synthetic construct
ARIWPGGSTYYA

SEQ ID NO: 1293 - protein, 14 aa, synthetic construct
AGINWRSGGSTYYA

SEQ ID NO: 1294 - protein, 12 aa, synthetic construct
ASISSGGTTAYA

SEQ ID NO: 1295 - protein, 12 aa, synthetic construct
AGINMISSTKYA

SEQ ID NO: 1296 - protein, 11 aa, synthetic construct
ARIAGGSTYYA

SEQ ID NO: 1297 - protein, 12 aa, synthetic construct
AAITSSGSTNYA

SEQ ID NO: 1298 - protein, 12 aa, synthetic construct
ASITKFGSTNYA

SEQ ID NO: 1299 - protein, 12 aa, synthetic construct
ASISRFGRTNYA

SEQ ID NO: 1300 - protein, 12 aa, synthetic construct
ARISSGGSTSYA

SEQ ID NO: 1301 - protein, 12 aa, synthetic construct
AAITSGGRTSYA

SEQ ID NO: 1302 - protein, 12 aa, synthetic construct
AQITRGGSTNYA

SEQ ID NO: 1303 - protein, 18 aa, synthetic construct
CAKGDSGSYYGSSYFDYW

SEQ ID NO: 1304 - protein, 25 aa, synthetic construct
CTRVRRGSGVAPYSSSWGRYYFDYW

SEQ ID NO: 1305 - protein, 22 aa, synthetic construct
CAKDGSGTIFGVVIAKYYFDYW

SEQ ID NO: 1306 - protein, 19 aa, synthetic construct
CASWGPLWSGSPNDAFDIW

SEQ ID NO: 1307 - protein, 22 aa, synthetic construct
CARVRSYDSTAYDEPLDALDIW

SEQ ID NO: 1308 - protein, 19 aa, synthetic construct
CGRDARSSGYNGYDLFDIW

SEQ ID NO: 1309 - protein, 14 aa, synthetic construct
CAKGPLVGWYFDLW

SEQ ID NO: 1310 - protein, 19 aa, synthetic construct
CASWGPLWSGSPNDAFDIW

SEQ ID NO: 1311 - protein, 18 aa, synthetic construct
CTRQGDSSGWYDGWFDPW

SEQ ID NO: 1312 - protein, 12 aa, synthetic construct
CIATVVSPLDYW

SEQ ID NO: 1313 - protein, 16 aa, synthetic construct
CARDESSSSLNWFDPW

SEQ ID NO: 1314 - protein, 16 aa, synthetic construct
CASPDPLGSVADLDYW

SEQ ID NO: 1315 - protein, 14 aa, synthetic construct
CARVWSSSSVFDYW

SEQ ID NO: 1316 - protein, 17 aa, synthetic construct
CAKDRGGGSYYGTFDYW

SEQ ID NO: 1317 - protein, 20 aa, synthetic construct
CTRVRVAGYSSSWYDAFDIW

SEQ ID NO: 1318 - protein, 19 aa, synthetic construct
CVKGTIPIFGVIRSAFDYW

SEQ ID NO: 1319 - protein, 14 aa, synthetic construct
CARGSGSYSFFDYW

SEQ ID NO: 1320 - protein, 20 aa, synthetic construct
CATTPGPWIQLWFGGGFDYW

SEQ ID NO: 1321 - protein, 15 aa, synthetic construct
CAKDGLVVAGTFDYW

SEQ ID NO: 1322 - protein, 16 aa, synthetic construct
CARGALLEWLSRFDNW

SEQ ID NO: 1323 - protein, 14 aa, synthetic construct
CARDLGAADLIDYW

SEQ ID NO: 1324 - protein, 19 aa, synthetic construct
CVRVPAAAGKGVPGIFDIW

SEQ ID NO: 1325 - protein, 18 aa, synthetic construct
CARVRQGLRRTWYYFDYW

SEQ ID NO: 1326 - protein, 13 aa, synthetic construct
CAKEYSSSWFDPW

SEQ ID NO: 1327 - protein, 19 aa, synthetic construct
CAKREDYDFWSGRGAFDIW

SEQ ID NO: 1328 - protein, 16 aa, synthetic construct
CAKDIGYSSSWSFDYW

SEQ ID NO: 1329 - protein, 15 aa, synthetic construct
CARDDYSDYRPFDYW

SEQ ID NO: 1330 - protein, 17 aa, synthetic construct
CAHRPSLQWLDWWFDPW

SEQ ID NO: 1331 - protein, 17 aa, synthetic construct
CAKDGASGWPNWHFDLW

SEQ ID NO: 1332 - protein, 13 aa, synthetic construct
CAKGAAAGPFDYW

SEQ ID NO: 1333 - protein, 19 aa, synthetic construct
CAKEEYYYDSSGPNWFDPW

SEQ ID NO: 1334 - protein, 17 aa, synthetic construct
WAPQGGTTVPTGRFDPW

SEQ ID NO: 1335 - protein, 17 aa, synthetic construct
CSRGGGPAAGFHGLDVW

SEQ ID NO: 1336 - protein, 19 aa, synthetic construct
CARAAKRQQLFPRNYFDYW

SEQ ID NO: 1337 - protein, 14 aa, synthetic construct
CALHYGSGRSFDYW

SEQ ID NO: 1338 - protein, 19 aa, synthetic construct
CARPGGRIVGALWGAFDYW

SEQ ID NO: 1339 - protein, 18 aa, synthetic construct
CAKNWGDAGTTWFEKSGW

SEQ ID NO: 1340 - protein, 9 aa, synthetic construct
CAIDPDGEW

SEQ ID NO: 1341 - protein, 13 aa, synthetic construct
CAADVRDSIWRSW

SEQ ID NO: 1342 - protein, 18 aa, synthetic construct
CARLSCHDYSCYSAFDFW

SEQ ID NO: 1343 - protein, 17 aa, synthetic construct
CAAAGSMGWNHLRDYDW

SEQ ID NO: 1344 - protein, 18 aa, synthetic construct
CAARSGWGAAMRSADFRW

SEQ ID NO: 1345 - protein, 19 aa, synthetic construct
CARSPRFSGVVVRPGLDLW

SEQ ID NO: 1346 - protein, 16 aa, synthetic construct
CAACSDYYCSGVGAVW

SEQ ID NO: 1347 - protein, 23 aa, synthetic construct
CAKDSWDSSGYSYHYYYYGMDVW

SEQ ID NO: 1348 - protein, 15 aa, synthetic construct
CARGDIAVIQVLDYW

SEQ ID NO: 1349 - protein, 10 aa, synthetic construct
CAYSGIGTDW

SEQ ID NO: 1350 - protein, 10 aa, synthetic construct
CAAGWGDSAW

SEQ ID NO: 1351 - protein, 12 aa, synthetic construct
CAAFDGYTGSDW

SEQ ID NO: 1352 - protein, 20 aa, synthetic construct
CAADLTDIWEGIREYDEYAW

SEQ ID NO: 1353 - protein, 12 aa, synthetic construct
CAAGLRGRQYSW

SEQ ID NO: 1354 - protein, 12 aa, synthetic construct
CAAFDGYSGSDW

SEQ ID NO: 1355 - protein, 16 aa, synthetic construct
CATGPYRSYFARSYLW

SEQ ID NO: 1356 - protein, 19 aa, synthetic construct
CAATQWGSSGWKQARWYDW

SEQ ID NO: 1357 - protein, 20 aa, synthetic construct
CAKDPIAAADPGDSVSFDYW

SEQ ID NO: 1358 - protein, 12 aa, synthetic construct
CALNVWRTSSDW

SEQ ID NO: 1359 - protein, 13 aa, synthetic construct
CAAVTTQTYGYDW

SEQ ID NO: 1360 - protein, 16 aa, synthetic construct
CARHSDYSGLSNFDYW

SEQ ID NO: 1361 - protein, 17 aa, synthetic construct
CAKAKATVGLRAPFDYW

SEQ ID NO: 1362 - protein, 13 aa, synthetic construct
CALRVRPYGQYDW

SEQ ID NO: 1363 - protein, 20 aa, synthetic construct
CAVSKPLNYYTYYDARRYDW

SEQ ID NO: 1364 - protein, 20 aa, synthetic construct
CAVSQPLNYYTYYDARRYDW

SEQ ID NO: 1365 - protein, 20 aa, synthetic construct
CAASQAPITIATMMKPFYDW

SEQ ID NO: 1366 - protein, 13 aa, synthetic construct
CAVDLSGDAVYDW

SEQ ID NO: 1367 - protein, 13 aa, synthetic construct
CALPVGPYGQYDW

SEQ ID NO: 1368 - protein, 13 aa, synthetic construct
CALRVRPYGQYDW

SEQ ID NO: 1369 - protein, 18 aa, synthetic construct
CAADGVPEYSDYASGPVW

SEQ ID NO: 1370 - protein, 19 aa, synthetic construct
CARHTGRYSSGSTGWFHYW

SEQ ID NO: 1371 - protein, 13 aa, synthetic construct
CARTTFDNWFDPW

SEQ ID NO: 1372 - protein, 18 aa, synthetic construct
CAADGVPEYSDYASGPVW

SEQ ID NO: 1373 - protein, 13 aa, synthetic construct
ARREYIESGFDSW

SEQ ID NO: 1374 - protein, 19 aa, synthetic construct
CAATRGRSTRLVLPSLVEW

SEQ ID NO: 1375 - protein, 21 aa, synthetic construct
CAAALSEVWRGSENLREGYDW

SEQ ID NO: 1376 - protein, 13 aa, synthetic construct
CAARSVYSYEYNW

SEQ ID NO: 1377 - protein, 18 aa, synthetic construct
CAADGVPEYSDYASGPVW

SEQ ID NO: 1378 - protein, 12 aa, synthetic construct
CAKEDVGKPFDW

SEQ ID NO: 1379 - protein, 9 aa, synthetic construct
CAVDGPFGW

SEQ ID NO: 1380 - protein, 18 aa, synthetic construct
CAADRAADFFAQRDEYDW

SEQ ID NO: 1381 - protein, 10 aa, synthetic construct
CAARRWGYDW

SEQ ID NO: 1382 - protein, 9 aa, synthetic construct
CAKIGTLWW

SEQ ID NO: 1383 - protein, 18 aa, synthetic construct
CAADGVPEYSDYASGPVW

SEQ ID NO: 1384 - protein, 14 aa, synthetic construct
CAPTFAAGASEYHW

SEQ ID NO: 1385 - protein, 14 aa, synthetic construct
CARGAYGSGTYDYW

SEQ ID NO: 1386 - protein, 13 aa, synthetic construct
CASAYNPGIGYDW

SEQ ID NO: 1387 - protein, 12 aa, synthetic construct
CAKEDVGKPFDW

SEQ ID NO: 1388 - protein, 12 aa, synthetic construct
CAKEDVGKPFDW

SEQ ID NO: 1389 - protein, 12 aa, synthetic construct
CALRRRFGGQEW

SEQ ID NO: 1390 - protein, 12 aa, synthetic construct
CAKEDVGKPFDW

SEQ ID NO: 1391 - protein, 12 aa, synthetic construct
CAKQDVGKPFDW

SEQ ID NO: 1392 - protein, 10 aa, synthetic construct
CAARILSRNW

SEQ ID NO: 1393 - protein, 30 aa, synthetic construct
CAREVGLYYYGSGSSSRRLLGRIDYYFDYW

SEQ ID NO: 1394 - protein, 12 aa, synthetic construct
CAAFDGYTGSDW

SEQ ID NO: 1395 - protein, 18 aa, synthetic construct
CAADGVPEYSDYASGPVW

SEQ ID NO: 1396 - protein, 9 aa, synthetic construct
CAVDGPFGW

SEQ ID NO: 1397 - protein, 16 aa, synthetic construct
CTTDYSKLAITKLSYW

SEQ ID NO: 1398 - protein, 13 aa, synthetic construct
CAARRWIPPGPIW

SEQ ID NO: 1399 - protein, 16 aa, synthetic construct
CAAEVRNGSDYLPIDW

SEQ ID NO: 1400 - protein, 13 aa, synthetic construct
CAAQTEDSAQYIW

SEQ ID NO: 1401 - protein, 18 aa, synthetic construct
CAADGVPEYSDYASGPVW

SEQ ID NO: 1402 - protein, 18 aa, synthetic construct
CAADGVPEYSDYASGPVW

SEQ ID NO: 1403 - protein, 19 aa, synthetic construct
CATFPAIVTDSDYDLGNDW

SEQ ID NO: 1404 - protein, 20 aa, synthetic construct
CAVSQPLNYYTYYDARRYDW

SEQ ID NO: 1405 - protein, 13 aa, synthetic construct
CAARSVYSYDYNW

SEQ ID NO: 1406 - protein, 18 aa, synthetic construct
CAADGVPEYSDYASGPVW

SEQ ID NO: 1407 - protein, 18 aa, synthetic construct
CAAELHSSDYTSPGAYAW

SEQ ID NO: 1408 - protein, 17 aa, synthetic construct
CALPSNIITTDYLRVYW

SEQ ID NO: 1409 - protein, 12 aa, synthetic construct
CAKEDVGKPFDW

SEQ ID NO: 1410 - protein, 12 aa, synthetic construct
CAKEDVGKPFDW

SEQ ID NO: 1411 - protein, 13 aa, synthetic construct
CASAYNPGIGYDW

SEQ ID NO: 1412 - protein, 20 aa, synthetic construct
CAVSHPLNYYTYYDARRYDW

SEQ ID NO: 1413 - protein, 19 aa, synthetic construct
CAARRWMGGSYFDPGNYDW

SEQ ID NO: 1414 - protein, 12 aa, synthetic construct
CAKEDVGKPFDW

SEQ ID NO: 1415 - protein, 23 aa, synthetic construct
CARAPFYCTTTKCQDNYYYMDVW

SEQ ID NO: 1416 - protein, 20 aa, synthetic construct
CARERRYYDSSGYPYYFDYW

SEQ ID NO: 1417 - protein, 14 aa, synthetic construct
CAREDYYDSSGYSW

SEQ ID NO: 1418 - protein, 16 aa, synthetic construct
CANLAYYDSSGYYDYW

SEQ ID NO: 1419 - protein, 20 aa, synthetic construct
CAVVAMRMVTTEGPDVLDVW

SEQ ID NO: 1420 - protein, 10 aa, synthetic construct
CARWGPFDIW

SEQ ID NO: 1421 - protein, 14 aa, synthetic construct
CTRSEYSSGWYDYW

SEQ ID NO: 1422 - protein, 23 aa, synthetic construct
CARGAPYFDHGSKSYRLFYFDYW

SEQ ID NO: 1423 - protein, 20 aa, synthetic construct
CARGGPNYYASGRYPWFDPW

SEQ ID NO: 1424 - protein, 20 aa, synthetic construct
CAREGYYYDSSGYPYYFDYW

SEQ ID NO: 1425 - protein, 9 aa, synthetic construct
CATDPPLFW

SEQ ID NO: 1426 - protein, 15 aa, synthetic construct
CARASPNTGWHFDRW

SEQ ID NO: 1427 - protein, 9 aa, synthetic construct
CATDPPLFW

SEQ ID NO: 1428 - protein, 15 aa, synthetic construct
CAEPSPNTGWHFDHW

SEQ ID NO: 1429 - protein, 9 aa, synthetic construct
CATDPPLFW

SEQ ID NO: 1430 - protein, 9 aa, synthetic construct
CATDPPLFW

SEQ ID NO: 1431 - protein, 15 aa, synthetic construct
CATASPNTGWHFDHW

SEQ ID NO: 1432 - protein, 9 aa, synthetic construct
CATDPPLFW

SEQ ID NO: 1433 - protein, 9 aa, synthetic construct
CATDPPLFW

SEQ ID NO: 1434 - protein, 9 aa, synthetic construct
CATDPPLFW

SEQ ID NO: 1435 - protein, 9 aa, synthetic construct
CATDPPLFW

SEQ ID NO: 1436 - protein, 9 aa, synthetic construct
CATDPPLFW

SEQ ID NO: 1437 - protein, 9 aa, synthetic construct
CATDPPLFW

SEQ ID NO: 1438 - protein, 9 aa, synthetic construct
CATDPPLFW

SEQ ID NO: 1439 - protein, 9 aa, synthetic construct
CATDPPLFW

SEQ ID NO: 1440 - protein, 9 aa, synthetic construct
CATDPPLFW

SEQ ID NO: 1441 - protein, 9 aa, synthetic construct
CATDPPLFW

SEQ ID NO: 1442 - protein, 9 aa, synthetic construct
CATDPPLFW

SEQ ID NO: 1443 - protein, 9 aa, synthetic construct
CATDPPLFW

SEQ ID NO: 1444 - protein, 15 aa, synthetic construct
CATDPPLFWGHVDLW

SEQ ID NO: 1445 - protein, 9 aa, synthetic construct
CATDPPLFW

SEQ ID NO: 1446 - protein, 9 aa, synthetic construct
CATDPPLFW

SEQ ID NO: 1447 - protein, 9 aa, synthetic construct
CATDPPLFW

SEQ ID NO: 1448 - protein, 9 aa, synthetic construct
CATDPPLFW

SEQ ID NO: 1449 - protein, 13 aa, synthetic construct
CAASPSLRSAWQW

SEQ ID NO: 1450 - protein, 9 aa, synthetic construct
CATDPPLFW

SEQ ID NO: 1451 - protein, 15 aa, synthetic construct
CARATPNTGWHFDHW

SEQ ID NO: 1452 - protein, 9 aa, synthetic construct
CATDPPLFW

SEQ ID NO: 1453 - protein, 9 aa, synthetic construct
CATDPPLFW

SEQ ID NO: 1454 - protein, 9 aa, synthetic construct
CATDPPLFW

SEQ ID NO: 1455 - protein, 15 aa, synthetic construct
CATASPNTGWHFDHW

SEQ ID NO: 1456 - protein, 18 aa, synthetic construct
CAADRRGLASTRAGDYDW

SEQ ID NO: 1457 - protein, 20 aa, synthetic construct
CAADRGVYGGRWYRTSQYTW

SEQ ID NO: 1458 - protein, 15 aa, synthetic construct
CATDPPLFCWHFDHW

SEQ ID NO: 1459 - protein, 11 aa, synthetic construct
CATTMNPNPRW

SEQ ID NO: 1460 - protein, 15 aa, synthetic construct
CATAPPLFCWHFDHW

SEQ ID NO: 1461 - protein, 23 aa, synthetic construct
CATLPFYDFWSGYYTGYYYMDVW

SEQ ID NO: 1462 - protein, 9 aa, synthetic construct
CATDRPLFW

SEQ ID NO: 1463 - protein, 11 aa, synthetic construct
CATTENPNPRW

SEQ ID NO: 1464 - protein, 9 aa, synthetic construct
CATDPPLFW

SEQ ID NO: 1465 - protein, 15 aa, synthetic construct
CATDPPLFCCHVDLW

SEQ ID NO: 1466 - protein, 15 aa, synthetic construct
CATDPPLFWGHVDLW

SEQ ID NO: 1467 - protein, 9 aa, synthetic construct
CATDPPLFW

SEQ ID NO: 1468 - protein, 15 aa, synthetic construct
CATARPNTGWHFDHW

SEQ ID NO: 1469 - protein, 9 aa, synthetic construct
CATDPPLFW

SEQ ID NO: 1470 - protein, 15 aa, synthetic construct
CATDPPLFWGHVDLW

SEQ ID NO: 1471 - protein, 15 aa, synthetic construct
CAKASPNTGWHFDHW

SEQ ID NO: 1472 - protein, 9 aa, synthetic construct
CATDPPLFW

SEQ ID NO: 1473 - protein, 15 aa, synthetic construct
CARASPNTGWHFDHW

SEQ ID NO: 1474 - protein, 13 aa, synthetic construct
CAVPWMDYNRRDW

SEQ ID NO: 1475 - protein, 21 aa, synthetic construct
CAKGGYCSSDTCWWEYWLDPW

SEQ ID NO: 1476 - protein, 24 aa, synthetic construct
CARDLPASYYDSSGYYWHNGMDVW

SEQ ID NO: 1477 - protein, 17 aa, synthetic construct
CAREADCLPSPWYLDLW

SEQ ID NO: 1478 - protein, 12 aa, synthetic construct
CAREADGLHSPW

SEQ ID NO: 1479 - protein, 17 aa, synthetic construct
CAREADGLHSPWHFDLW

SEQ ID NO: 1480 - protein, 17 aa, synthetic construct
CAREADGLHSPWHFDLW

SEQ ID NO: 1481 - protein, 17 aa, synthetic construct
CAREADGLHSPWHFDLW

SEQ ID NO: 1482 - protein, 17 aa, synthetic construct
CAREADGLHSPWHFDLW

SEQ ID NO: 1483 - protein, 11 aa, synthetic construct
CARLIDAFDIW

SEQ ID NO: 1484 - protein, 17 aa, synthetic construct
CARQSDGLPSPWHFDLG

SEQ ID NO: 1485 - protein, 12 aa, synthetic construct
CVRHDEYSFDYW

SEQ ID NO: 1486 - protein, 12 aa, synthetic construct
CVRHDEYSFDYW

SEQ ID NO: 1487 - protein, 12 aa, synthetic construct
CVRHDEYSFDYW

SEQ ID NO: 1488 - protein, 12 aa, synthetic construct
CVRHDEYSFDYW

SEQ ID NO: 1489 - protein, 12 aa, synthetic construct
CVRHDEYSFDYW

SEQ ID NO: 1490 - protein, 18 aa, synthetic construct
CAKDRGYSSSWYGGFDYW

SEQ ID NO: 1491 - protein, 18 aa, synthetic construct
CARGLKFLEWLPSAFDIW

SEQ ID NO: 1492 - protein, 17 aa, synthetic construct
CARGTRFLEWSLPLDVW

SEQ ID NO: 1493 - protein, 17 aa, synthetic construct
CARGTRFLQWSLPLDVW

SEQ ID NO: 1494 - protein, 16 aa, synthetic construct
CARHAWWKGAGFFDHW

SEQ ID NO: 1495 - protein, 16 aa, synthetic construct
CARHTWWKGAGFFDHW

SEQ ID NO: 1496 - protein, 16 aa, synthetic construct
CARHTWWKGAGFFDHW

SEQ ID NO: 1497 - protein, 16 aa, synthetic construct
CARHTWWKGAGFFDHW

SEQ ID NO: 1498 - protein, 16 aa, synthetic construct
CARHTWWKGAGFFDHW

SEQ ID NO: 1499 - protein, 21 aa, synthetic construct
CARVKYLTTSSGWPRPYFDNW

SEQ ID NO: 1500 - protein, 21 aa, synthetic construct
CARVKYLTTSSGWPRPYFDNW

SEQ ID NO: 1501 - protein, 21 aa, synthetic construct
CARVKYLTTSSGWPRPYFDNW

SEQ ID NO: 1502 - protein, 21 aa, synthetic construct
CARVKYLTTSSGWPRPYFDNW

SEQ ID NO: 1503 - protein, 21 aa, synthetic construct
CARVKYLTTSSGWPRPYFDNW

SEQ ID NO: 1504 - protein, 16 aa, synthetic construct
CGRSKWPQANGAFDIW

SEQ ID NO: 1505 - protein, 21 aa, synthetic construct
CAKGGYCSSDTCWWEYWLDPW

SEQ ID NO: 1506 - protein, 17 aa, synthetic construct
CARQSDGLPSPWHFDLG

SEQ ID NO: 1507 - protein, 17 aa, synthetic construct
CAREADGLHSPWHFDLW

SEQ ID NO: 1508 - protein, 24 aa, synthetic construct
CARDLPASYYDSSGYYWHNGMDVW

SEQ ID NO: 1509 - protein, 17 aa, synthetic construct
CAREADGLHSPWHFDLW

SEQ ID NO: 1510 - protein, 12 aa, synthetic construct
CVRHDEYSFDYW

SEQ ID NO: 1511 - protein, 17 aa, synthetic construct
CAREADGLHSPWHFDLW

SEQ ID NO: 1512 - protein, 12 aa, synthetic construct
CVRHDEYSFDYW

SEQ ID NO: 1513 - protein, 12 aa, synthetic construct
CVRHDEYSFDYW

SEQ ID NO: 1514 - protein, 12 aa, synthetic construct
CAREADGLHSPW

SEQ ID NO: 1515 - protein, 12 aa, synthetic construct
CVRHDEYSFDYW

SEQ ID NO: 1516 - protein, 17 aa, synthetic construct
CAREADGLHSPWHFDLW

SEQ ID NO: 1517 - protein, 17 aa, synthetic construct
CAREADGLHSPWHFDLW

SEQ ID NO: 1518 - protein, 11 aa, synthetic construct
CARLIDAFDIW

SEQ ID NO: 1519 - protein, 16 aa, synthetic construct
CAREGYRDYLWYFDLW

SEQ ID NO: 1520 - protein, 18 aa, synthetic construct
CARVRQGLRRTWYYFDYW

SEQ ID NO: 1521 - protein, 18 aa, synthetic construct
CARDTNDFWSGYSIFDPW

SEQ ID NO: 1522 - protein, 16 aa, synthetic construct
CAREGYRDYLWYFDLW

SEQ ID NO: 1523 - protein, 14 aa, synthetic construct
CAKGPLVGWYFDLW

SEQ ID NO: 1524 - protein, 11 aa, synthetic construct
CARLIDAFDIW

SEQ ID NO: 1525 - protein, 17 aa, synthetic construct
CTTGDDFWSGGNWFDPW

SEQ ID NO: 1526 - protein, 24 aa, synthetic construct
CARDLPASYYDSSGYYWHNGMDVW

SEQ ID NO: 1527 - protein, 15 aa, synthetic construct
CARVGGGYWYGIDVW

SEQ ID NO: 1528 - protein, 17 aa, synthetic construct
CARGYSRNWYPSWFDPW

SEQ ID NO: 1529 - protein, 10 aa, synthetic construct
CAGGWYLDYW

SEQ ID NO: 1530 - protein, 13 aa, synthetic construct
CASLCIVDPFDIW

SEQ ID NO: 1531 - protein, 12 aa, synthetic construct
CVRHDEYSFDYW

SEQ ID NO: 1532 - protein, 21 aa, synthetic construct
CARVKYLTTSSGWPRPYFDNW

SEQ ID NO: 1533 - protein, 16 aa, synthetic construct
CGRSKWPQANGAFDIW

SEQ ID NO: 1534 - protein, 18 aa, synthetic construct
CAKDRGYSSSWYGGFDYW

SEQ ID NO: 1535 - protein, 17 aa, synthetic construct
CARGTRFLQWSLPLDVW

SEQ ID NO: 1536 - protein, 16 aa, synthetic construct
CARHTWWKGAGFFDHW

SEQ ID NO: 1537 - protein, 17 aa, synthetic construct
CARGTRFLEWSLPLDVW

SEQ ID NO: 1538 - protein, 21 aa, synthetic construct
CARVKYLTTSSGWPRPYFDNW

SEQ ID NO: 1539 - protein, 16 aa, synthetic construct
CARHTWWKGAGFFDHW

SEQ ID NO: 1540 - protein, 16 aa, synthetic construct
CARHAWWKGAGFFDHW

SEQ ID NO: 1541 - protein, 21 aa, synthetic construct
CARVKYLTTSSGWPRPYFDNW

SEQ ID NO: 1542 - protein, 16 aa, synthetic construct
CARHTWWKGAGFFDHW

SEQ ID NO: 1543 - protein, 18 aa, synthetic construct
CARGLKFLEWLPSAFDIW

SEQ ID NO: 1544 - protein, 21 aa, synthetic construct
CARVKYLTTSSGWPRPYFDNW

SEQ ID NO: 1545 - protein, 21 aa, synthetic construct
CARVKYLTTSSGWPRPYFDNW

SEQ ID NO: 1546 - protein, 16 aa, synthetic construct
CARHTWWKGAGFFDHW

SEQ ID NO: 1547 - protein, 18 aa, synthetic construct
CARDAHGYYYDSSGYDDW

SEQ ID NO: 1548 - protein, 15 aa, synthetic construct
CAKGVYGSTVTTCHW

SEQ ID NO: 1549 - protein, 12 aa, synthetic construct
CARPTNWGFDYW

SEQ ID NO: 1550 - protein, 14 aa, synthetic construct
CARADSNWASSAYW

SEQ ID NO: 1551 - protein, 19 aa, synthetic construct
CARDPYSYGYYYYYGMDVW

SEQ ID NO: 1552 - protein, 13 aa, synthetic construct
CARARNWGPSDYW

SEQ ID NO: 1553 - protein, 18 aa, synthetic construct
CARDATYSSSWYNWFDPW

SEQ ID NO: 1554 - protein, 12 aa, synthetic construct
CARGTVTSFDFW

SEQ ID NO: 1555 - protein, 18 aa, synthetic construct
CAKDYHSASWFSAAADYW

SEQ ID NO: 1556 - protein, 18 aa, synthetic construct
CAREGQEYSSGSSYFDYW

SEQ ID NO: 1557 - protein, 21 aa, synthetic construct
CARGSQTPYCGGDCPETFDYW

SEQ ID NO: 1558 - protein, 16 aa, synthetic construct
CARDLYSSGWYGFDYW

SEQ ID NO: 1559 - protein, 20 aa, synthetic construct
CARDNYDFWSGYYTNWFDPW

SEQ ID NO: 1560 - protein, 25 aa, synthetic construct
CARDSLSVTMGRGVVTYYYYGMDFW

SEQ ID NO: 1561 - protein, 13 aa, synthetic construct
CARTTVTTPPLIW

SEQ ID NO: 1562 - protein, 11 aa, synthetic construct
CATTENPNPRW

SEQ ID NO: 1563 - protein, 9 aa, synthetic construct
CATDPPLFW

SEQ ID NO: 1564 - protein, 11 aa, synthetic construct
CATTEDPYPRW

SEQ ID NO: 1565 - protein, 15 aa, synthetic construct
CARASPNTGWHFDHW

SEQ ID NO: 1566 - protein, 11 aa, synthetic construct
CAAYQAGWGDW

SEQ ID NO: 1567 - protein, 11 aa, synthetic construct
CATTENPNPRW

SEQ ID NO: 1568 - protein, 15 aa, synthetic construct
CAKRANPTGAYFDYW

SEQ ID NO: 1569 - protein, 20 aa, synthetic construct
CAADRGVYGGRWYRTSQYTW

SEQ ID NO: 1570 - protein, 17 aa, synthetic construct
CAVKPGWVARDPSQYNW

SEQ ID NO: 1571 - protein, 13 aa, synthetic construct
CAASPSLRSAWQW

SEQ ID NO: 1572 - protein, 18 aa, synthetic construct
CAADRRGLASTRAADYDW

SEQ ID NO: 1573 - protein, 15 aa, synthetic construct
CATAPPLFCWHFDLW

SEQ ID NO: 1574 - protein, 15 aa, synthetic construct
CATDPPLFWGHVDLW

SEQ ID NO: 1575 - protein, 15 aa, synthetic construct
CATAPPNTGWHFDHW

SEQ ID NO: 1576 - protein, 15 aa, synthetic construct
CATATPNTGWHFDHW

SEQ ID NO: 1577 - protein, 9 aa, synthetic construct
CATDPPLFW

SEQ ID NO: 1578 - protein, 9 aa, synthetic construct
CATDPPLFW

SEQ ID NO: 1579 - protein, 9 aa, synthetic construct
CATDPPLFW

SEQ ID NO: 1580 - protein, 9 aa, synthetic construct
CATDPPLFW

SEQ ID NO: 1581 - protein, 9 aa, synthetic construct
CATDPPLFW

SEQ ID NO: 1582 - protein, 23 aa, synthetic construct
CATLPFYDFWSGYYTGYYYMDVW

SEQ ID NO: 1583 - protein, 9 aa, synthetic construct
CATDPPLFW

SEQ ID NO: 1584 - protein, 9 aa, synthetic construct
CATDPPLFW

SEQ ID NO: 1585 - protein, 15 aa, synthetic construct
CATASPNTGWHFDHW

SEQ ID NO: 1586 - protein, 18 aa, synthetic construct
CAADRRGLASTRAADYDW

SEQ ID NO: 1587 - protein, 15 aa, synthetic construct
CATEPPLSCWHFDLW

SEQ ID NO: 1588 - protein, 15 aa, synthetic construct
CATAPPNTGWHFDHW

SEQ ID NO: 1589 - protein, 15 aa, synthetic construct
CATDPPLFCCHFDLW

SEQ ID NO: 1590 - protein, 9 aa, synthetic construct
CATDPPLFW

SEQ ID NO: 1591 - protein, 9 aa, synthetic construct
CATDPPLFW

SEQ ID NO: 1592 - protein, 9 aa, synthetic construct
CATDPPLFW

SEQ ID NO: 1593 - protein, 9 aa, synthetic construct
CATDPPLFW

SEQ ID NO: 1594 - protein, 9 aa, synthetic construct
CATDPPLFW

SEQ ID NO: 1595 - protein, 9 aa, synthetic construct
CATDPPLFW

SEQ ID NO: 1596 - protein, 9 aa, synthetic construct
CATDPPLFW

SEQ ID NO: 1597 - protein, 9 aa, synthetic construct
CATDPPLFW

SEQ ID NO: 1598 - protein, 15 aa, synthetic construct
CATDPPLFWGHVDLW

SEQ ID NO: 1599 - protein, 9 aa, synthetic construct
CATDPPLFW

SEQ ID NO: 1600 - protein, 9 aa, synthetic construct
CATDPPLFW

SEQ ID NO: 1601 - protein, 18 aa, synthetic construct
CAADRRGLASTRAGDYDW

SEQ ID NO: 1602 - protein, 15 aa, synthetic construct
CATDPPLFWGHVDLW

SEQ ID NO: 1603 - protein, 9 aa, synthetic construct
CATDPPLFW

SEQ ID NO: 1604 - protein, 23 aa, synthetic construct
CARGGGWVPSSTSESLNWYFDRW

SEQ ID NO: 1605 - protein, 15 aa, synthetic construct
CATDPPLFCCHVDLW

SEQ ID NO: 1606 - protein, 9 aa, synthetic construct
CATDPPLFW

SEQ ID NO: 1607 - protein, 9 aa, synthetic construct
CATDPPLFW

SEQ ID NO: 1608 - protein, 15 aa, synthetic construct
CATDPPLFCWHFDHW

SEQ ID NO: 1609 - protein, 9 aa, synthetic construct
CATDPPLFW

SEQ ID NO: 1610 - protein, 9 aa, synthetic construct
CATDPPLFW

SEQ ID NO: 1611 - protein, 9 aa, synthetic construct
CATDPPLFW

SEQ ID NO: 1612 - protein, 9 aa, synthetic construct
CATDPPLFW

SEQ ID NO: 1613 - protein, 13 aa, synthetic construct
CAVPWMDYNRRDW

SEQ ID NO: 1614 - protein, 11 aa, synthetic construct
CATTMNPNPRW

SEQ ID NO: 1615 - protein, 9 aa, synthetic construct
CATDPPLFW

SEQ ID NO: 1616 - protein, 15 aa, synthetic construct
CATARPNTGWHFDHW

SEQ ID NO: 1617 - protein, 9 aa, synthetic construct
CATDPPLFW

SEQ ID NO: 1618 - protein, 9 aa, synthetic construct
CATDPPLFW

SEQ ID NO: 1619 - protein, 9 aa, synthetic construct
CATDPPLFW

SEQ ID NO: 1620 - protein, 9 aa, synthetic construct
CATDPPLFW

SEQ ID NO: 1621 - protein, 9 aa, synthetic construct
CATDPPLFW

SEQ ID NO: 1622 - protein, 9 aa, synthetic construct
CATDPPLFW

SEQ ID NO: 1623 - protein, 9 aa, synthetic construct
CATDPPLFW

SEQ ID NO: 1624 - protein, 15 aa, synthetic construct
CARASPNTGWHFDRW

SEQ ID NO: 1625 - protein, 9 aa, synthetic construct
CATDPPLFW

SEQ ID NO: 1626 - protein, 9 aa, synthetic construct
CATDRPLFW

SEQ ID NO: 1627 - protein, 15 aa, synthetic construct
CATASPNTGWHFDHW

SEQ ID NO: 1628 - protein, 9 aa, synthetic construct
CATDPPLFW

SEQ ID NO: 1629 - protein, 9 aa, synthetic construct
CATDPPLFW

SEQ ID NO: 1630 - protein, 9 aa, synthetic construct
CATDPPLFW

SEQ ID NO: 1631 - protein, 14 aa, synthetic construct
CAHRGGWLRPWGYW

SEQ ID NO: 1632 - protein, 9 aa, synthetic construct
CATDPPLFW

SEQ ID NO: 1633 - protein, 9 aa, synthetic construct
CATDPPLFW

SEQ ID NO: 1634 - protein, 9 aa, synthetic construct
CATDPPLFW

SEQ ID NO: 1635 - protein, 9 aa, synthetic construct
CATDPPLFW

SEQ ID NO: 1636 - protein, 15 aa, synthetic construct
CATDPPLFCWHFDHW

SEQ ID NO: 1637 - protein, 9 aa, synthetic construct
CATDPPLFW

SEQ ID NO: 1638 - protein, 15 aa, synthetic construct
CAEPSPNTGWHFDHW

SEQ ID NO: 1639 - protein, 9 aa, synthetic construct
CATDPPLFW

SEQ ID NO: 1640 - protein, 9 aa, synthetic construct
CATDPPLFW

SEQ ID NO: 1641 - protein, 15 aa, synthetic construct
CATAPPLFCWHFDHW

SEQ ID NO: 1642 - protein, 15 aa, synthetic construct
CAKASPNTGWHFDHW

SEQ ID NO: 1643 - protein, 9 aa, synthetic construct
CATDPPLFW

SEQ ID NO: 1644 - protein, 15 aa, synthetic construct
CARATPNTGWHFDHW

SEQ ID NO: 1645 - protein, 9 aa, synthetic construct
CATDPPLFW

SEQ ID NO: 1646 - protein, 15 aa, synthetic construct
CATDPPLFCCHFDHW

SEQ ID NO: 1647 - protein, 15 aa, synthetic construct
CATAPPNTGWHFDHW

SEQ ID NO: 1648 - protein, 18 aa, synthetic construct
CAADRRGLASTRAADYDW

SEQ ID NO: 1649 - protein, 17 aa, synthetic construct
CAAKPGWVARDPSQYNW

SEQ ID NO: 1650 - protein, 18 aa, synthetic construct
CAADRRGLASTRAADYDW

SEQ ID NO: 1651 - protein, 11 aa, synthetic construct
CATTENPNPRW

SEQ ID NO: 1652 - protein, 15 aa, synthetic construct
CAILVGPGQVEFDHW

SEQ ID NO: 1653 - protein, 22 aa, synthetic construct
CAALPFVCPSGSYSDYGDEYDW

SEQ ID NO: 1654 - protein, 9 aa, synthetic construct
CPTDPPLFW

SEQ ID NO: 1655 - protein, 14 aa, synthetic construct
CASLLAGDRYFDYW

SEQ ID NO: 1656 - protein, 18 aa, synthetic construct
CAADRRGLASTRAADYDW

SEQ ID NO: 1657 - protein, 17 aa, synthetic construct
CARDWRDRTWGNSLDYW

SEQ ID NO: 1658 - protein, 18 aa, synthetic construct
CAADRRGLASTRAADYDW

SEQ ID NO: 1659 - protein, 18 aa, synthetic construct
CAADRRGLASTRAADYDW

SEQ ID NO: 1660 - protein, 21 aa, synthetic construct
CARRVYYYDSSGPPGVTFDIW

SEQ ID NO: 1661 - protein, 14 aa, synthetic construct
CARQDSSSPYFDYW

SEQ ID NO: 1662 - protein, 18 aa, synthetic construct
CAADRRGLASTRAADYDW

SEQ ID NO: 1663 - protein, 21 aa, synthetic construct
CAQRVRGFFGPLRTTPSWYEW

SEQ ID NO: 1664 - protein, 23 aa, synthetic construct
CARTHYDFWSGYTSRTPNYFDYW

SEQ ID NO: 1665 - protein, 15 aa, synthetic construct
CAAVNTWTSPSFDSW

SEQ ID NO: 1666 - protein, 15 aa, synthetic construct
CAREVGPPPGYFDLW

SEQ ID NO: 1667 - protein, 18 aa, synthetic construct
CAAKGIWDYLGRRDFGDW

SEQ ID NO: 1668 - protein, 11 aa, synthetic construct
CATTENPNPRW

SEQ ID NO: 1669 - protein, 11 aa, synthetic construct
CVATPGGYGLW

SEQ ID NO: 1670 - protein, 20 aa, synthetic construct
CAADRGVYGGRWYRTSQYTW

SEQ ID NO: 1671 - protein, 15 aa, synthetic construct
CAAIAYEEGVYRWDW

SEQ ID NO: 1672 - protein, 14 aa, synthetic construct
CASGPPYSNYFAYW

SEQ ID NO: 1673 - protein, 15 aa, synthetic construct
CAKIMGSGRPYFDHW

SEQ ID NO: 1674 - protein, 15 aa, synthetic construct
CARPSSDLQGGVDYW

SEQ ID NO: 1675 - protein, 18 aa, synthetic construct
CAAKGIWDYLGRRDFGDW

SEQ ID NO: 1676 - protein, 17 aa, synthetic construct
CAAKPGWVARDPSEYNW

SEQ ID NO: 1677 - protein, 14 aa, synthetic construct
CARFARGSPYFDFW

SEQ ID NO: 1678 - protein, 16 aa, synthetic construct
CARGGGYYGSGSFEYW

SEQ ID NO: 1679 - protein, 18 aa, synthetic construct
CARGTAVGRPPPGGMDVW

SEQ ID NO: 1680 - protein, 14 aa, synthetic construct
CARVPPGQAYFDSW

SEQ ID NO: 1681 - protein, 18 aa, synthetic construct
CAKGGSWYYDSSGYYGRW

SEQ ID NO: 1682 - protein, 13 aa, synthetic construct
CAADRYGPPWYDW

SEQ ID NO: 1683 - protein, 14 aa, synthetic construct
CARIGLRGRYFDLW

SEQ ID NO: 1684 - protein, 13 aa, synthetic construct
CAVPWMDYNRRDW

SEQ ID NO: 1685 - protein, 13 aa, synthetic construct
CARTSGSYSFDYW

SEQ ID NO: 1686 - protein, 18 aa, synthetic construct
CAADRRGLASTRAADYDW

SEQ ID NO: 1687 - protein, 18 aa, synthetic construct
CAAKGIWDYLGRRDFGDW

SEQ ID NO: 1688 - protein, 14 aa, synthetic construct
CARDDSSSPYFDYW

SEQ ID NO: 1689 - protein, 11 aa, synthetic construct
CATTMNPNPRW

SEQ ID NO: 1690 - protein, 11 aa, synthetic construct
CATTENPNPRW

SEQ ID NO: 1691 - protein, 18 aa, synthetic construct
CAADRRGLASTRAADYDW

SEQ ID NO: 1692 - protein, 15 aa, synthetic construct
CATTSPNTGWHYYRW

SEQ ID NO: 1693 - protein, 21 aa, synthetic construct
CARWGPGPAGGSPGLVGFDYW

SEQ ID NO: 1694 - protein, 11 aa, synthetic construct
CAAYQRGWGDW

SEQ ID NO: 1695 - protein, 17 aa, synthetic construct
CAAKPGWVARDPSEYNW

SEQ ID NO: 1696 - protein, 9 aa, synthetic construct
CATDPPLFW

SEQ ID NO: 1697 - protein, 20 aa, synthetic construct
CAKISKDDGGKPRGAFFDSW

SEQ ID NO: 1698 - protein, 15 aa, synthetic construct
CARLATGPQAYFHHW

SEQ ID NO: 1699 - protein, 14 aa, synthetic construct
CARVGRGTTAFDSW

SEQ ID NO: 1700 - protein, 21 aa, synthetic construct
CAQRVRGFFGPLRTTPSWYEW

SEQ ID NO: 1701 - protein, 14 aa, synthetic construct
CASLLAGDRYFDYW

SEQ ID NO: 1702 - protein, 12 aa, synthetic construct
CAKEDVGKPFDW

SEQ ID NO: 1703 - protein, 17 aa, synthetic construct
CASWDGLIGLDAYEYDW

SEQ ID NO: 1704 - protein, 12 aa, synthetic construct
CAAFDGYTGSDW

SEQ ID NO: 1705 - protein, 12 aa, synthetic construct
CAADDCYIGCGW

SEQ ID NO: 1706 - protein, 21 aa, synthetic construct
CAAELHSSDYTSPGAESDYGW

SEQ ID NO: 1707 - protein, 21 aa, synthetic construct
CAASASDYGLGLELFHDEYNW

SEQ ID NO: 1708 - protein, 10 aa, synthetic construct
CATVATALIW

SEQ ID NO: 1709 - protein, 18 aa, synthetic construct
CAAELHSSDYTSPGAYAW

SEQ ID NO: 1710 - protein, 10 aa, synthetic construct
CAAIGDGAVW

SEQ ID NO: 1711 - protein, 13 aa, synthetic construct
CALQPFGASNYRW

SEQ ID NO: 1712 - protein, 10 aa, synthetic construct
CAAESWGRQW

SEQ ID NO: 1713 - protein, 11 aa, synthetic construct
CATSGSGSPNW

SEQ ID NO: 1714 - protein, 12 aa, synthetic construct
CAAYLDGYSGSW

SEQ ID NO: 1715 - protein, 12 aa, synthetic construct
CAGFDGYTGSDW

SEQ ID NO: 1716 - protein, 12 aa, synthetic construct
CARGRYGIVERW

SEQ ID NO: 1717 - protein, 13 aa, synthetic construct
CAARRWIPPGPIW

SEQ ID NO: 1718 - protein, 10 aa, synthetic construct
CALDIDYRDW

SEQ ID NO: 1719 - protein, 25 aa, synthetic construct
CAADVYPQDYGLGYVEGKMYYGMDW

SEQ ID NO: 1720 - protein, 11 aa, synthetic construct
CAAYGSGEFDW

SEQ ID NO: 1721 - protein, 10 aa, synthetic construct
CAARRWGYDW

SEQ ID NO: 1722 - protein, 19 aa, synthetic construct
CATFPAIVTDSDYDLGNDW

SEQ ID NO: 1723 - protein, 19 aa, synthetic construct
CASGSDNRARELSRYEYVW

SEQ ID NO: 1724 - protein, 12 aa, synthetic construct
CAAFDGYSGSDW

SEQ ID NO: 1725 - protein, 13 aa, synthetic construct
CALQPFGASSYRW

SEQ ID NO: 1726 - protein, 12 aa, synthetic construct
CAAFDGYSGNHW

SEQ ID NO: 1727 - protein, 19 aa, synthetic construct
CAARTSYNGRYDYIDDYSW

SEQ ID NO: 1728 - protein, 18 aa, synthetic construct
CAAAAGSTWYGTLYEYDW

SEQ ID NO: 1729 - protein, 9 aa, synthetic construct
CAVDGPFGW

SEQ ID NO: 1730 - protein, 11 aa, synthetic construct
CAKDWATGLAW

SEQ ID NO: 1731 - protein, 15 aa, synthetic construct
CAADVSPSYGSRWYW

SEQ ID NO: 1732 - protein, 12 aa, synthetic construct
CAAFDGYTGNYW

SEQ ID NO: 1733 - protein, 11 aa, synthetic construct
CASDESDAANW

SEQ ID NO: 1734 - protein, 8 aa, synthetic construct
CATNDDDV

SEQ ID NO: 1735 - protein, 18 aa, synthetic construct
CAAYRIVVGGTSPGDWRW

SEQ ID NO: 1736 - protein, 12 aa, synthetic construct
CALRRRFGGQEW

SEQ ID NO: 1737 - protein, 12 aa, synthetic construct
CAADNDMGYCSW

SEQ ID NO: 1738 - protein, 18 aa, synthetic construct
CAADGVPEYSDYASGPVW

SEQ ID NO: 1739 - protein, 16 aa, synthetic construct
CAAEVRNGSDYLPIDW

SEQ ID NO: 1740 - protein, 10 aa, synthetic construct
CAVDIDYRDW

SEQ ID NO: 1741 - protein, 12 aa, synthetic construct
CAELDGYFFAHW

SEQ ID NO: 1742 - protein, 11 aa, synthetic construct
CASTDDYGVDW

SEQ ID NO: 1743 - protein, 12 aa, synthetic construct
CAIAHGSSTYNW

SEQ ID NO: 1744 - protein, 13 aa, synthetic construct
CASAYDRGIGYDW

SEQ ID NO: 1745 - protein, 18 aa, synthetic construct
CAADRAADFFAQRDEYDW

SEQ ID NO: 1746 - protein, 12 aa, synthetic construct
CAAFDGGSGTQW

SEQ ID NO: 1747 - protein, 10 aa, synthetic construct
CATVGITLNW

SEQ ID NO: 1748 - protein, 13 aa, synthetic construct
CAARSVYSYEYNW

SEQ ID NO: 1749 - protein, 10 aa, synthetic construct
CALDIDYRHW

SEQ ID NO: 1750 - protein, 16 aa, synthetic construct
CAADRTYSYSSTGYYW

SEQ ID NO: 1751 - protein, 13 aa, synthetic construct
CASAYNPGIGYDW

SEQ ID NO: 1752 - protein, 18 aa, synthetic construct
CAAAAGTTWYGTLYEYDW

SEQ ID NO: 1753 - protein, 17 aa, synthetic construct
CAALIKPSSTDRIFEEW

SEQ ID NO: 1754 - protein, 11 aa, synthetic construct
CAARRWGYHYW

SEQ ID NO: 1755 - protein, 12 aa, synthetic construct
CAAFDGYTGRDW

SEQ ID NO: 1756 - protein, 18 aa, synthetic construct
CATTFGDAGIPDQYDFGW

SEQ ID NO: 1757 - protein, 8 aa, synthetic construct
CADINGDW

SEQ ID NO: 1758 - protein, 6 aa, synthetic construct
CAPFGW

SEQ ID NO: 1759 - protein, 15 aa, synthetic construct
CAADVSPSYGGRWYW

SEQ ID NO: 1760 - protein, 19 aa, synthetic construct
CAADLLGDSDYEPSSGFGW

SEQ ID NO: 1761 - protein, 15 aa, synthetic construct
CAAIAYEEGVYRWDW

SEQ ID NO: 1762 - protein, 10 aa, synthetic construct
CAAHGWGCHW

SEQ ID NO: 1763 - protein, 18 aa, synthetic construct
CAASAIGSGALRRFEYDW

SEQ ID NO: 1764 - protein, 15 aa, synthetic construct
CAAGNGGRYGIVERW

SEQ ID NO: 1765 - protein, 18 aa, synthetic construct
CAARKIYRSLSYYGDYDW

SEQ ID NO: 1766 - protein, 15 aa, synthetic construct
CAALIDYGLGFPIEW

SEQ ID NO: 1767 - protein, 12 aa, synthetic construct
CAAFDGYSGIDW

SEQ ID NO: 1768 - protein, 10 aa, synthetic construct
CAADIFFVNW

SEQ ID NO: 1769 - protein, 20 aa, synthetic construct
CAAEPYIPVRTMRHMTFLTW

SEQ ID NO: 1770 - protein, 11 aa, synthetic construct
CARVDYYMDVW

SEQ ID NO: 1771 - protein, 15 aa, synthetic construct
CARGPDSSGYGFDYW

SEQ ID NO: 1772 - protein, 11 aa, synthetic construct
CARVDRDFDYW

SEQ ID NO: 1773 - protein, 16 aa, synthetic construct
CANLAYYDSSGYYDYW

SEQ ID NO: 1774 - protein, 11 aa, synthetic construct
CTTVDQYFDYW

SEQ ID NO: 1775 - protein, 14 aa, synthetic construct
CAREDYYDSSGYSW

SEQ ID NO: 1776 - protein, 11 aa, synthetic construct
CARADDYFDYW

SEQ ID NO: 1777 - protein, 21 aa, synthetic construct
CAGYSTFGSSSAYYYYSMDVG

SEQ ID NO: 1778 - protein, 10 aa, synthetic construct
CARWGPFDIW

SEQ ID NO: 1779 - protein, 20 aa, synthetic construct
CARDDKYYDSSGYPAYFQHW

SEQ ID NO: 1780 - protein, 8 aa, synthetic construct [sequence omitted]

SEQ ID NO: 1781 - protein, 11 aa, synthetic construct
CARVDDYMDVW

SEQ ID NO: 1782 - protein, 18 aa, synthetic construct
CAFLVGPQGVDHGAFDVW

SEQ ID NO: 1783 - protein, 11 aa, synthetic construct
CASDYYYMDVW

SEQ ID NO: 1784 - protein, 13 aa, synthetic construct
CAKEGRAGSLDYW

SEQ ID NO: 1785 - protein, 18 aa, synthetic construct
CATFGATVTATNDAFDIW

SEQ ID NO: 1786 - protein, 19 aa, synthetic construct
CARLATSHQDGTGYLFDYW

SEQ ID NO: 1787 - protein, 20 aa, synthetic construct
CAREGYYYDSSGYLNYFDYW

SEQ ID NO: 1788 - protein, 15 aa, synthetic construct
CAIGYYDSSGYFDYW

SEQ ID NO: 1789 - protein, 19 aa, synthetic construct
CARDRYYDTSASYFESETW

SEQ ID NO: 1790 - protein, 14 aa, synthetic construct
CARSNTGWYSFDYW

SEQ ID NO: 1791 - protein, 13 aa, synthetic construct
CVRVTSDYSMDSW

SEQ ID NO: 1792 - protein, 14 aa, synthetic construct
CVRLSSGYYDFDYW

SEQ ID NO: 1793 - protein, 23 aa, synthetic construct
CARAPFYCTTTKCQDNYYYMDVW

SEQ ID NO: 1794 - protein, 18 aa, synthetic construct
CARGGDYDFWSVDYMDVW

SEQ ID NO: 1795 - protein, 11 aa, synthetic construct
CARVTTSFDYW

SEQ ID NO: 1796 - protein, 11 aa, synthetic construct
CATDYSAFDMW

SEQ ID NO: 1797 - protein, 14 aa, synthetic construct
CARVTSSLSGMDVW

SEQ ID NO: 1798 - protein, 14 aa, synthetic construct
CAREGYYDSSGYYW

SEQ ID NO: 1799 - protein, 11 aa, synthetic construct
CARADGYFDYW

SEQ ID NO: 1800 - protein, 14 aa, synthetic construct
CATFNWNDEGFDFW

SEQ ID NO: 1801 - protein, 19 aa, synthetic construct
CATDFYGWGTRERDAFDIW

SEQ ID NO: 1802 - protein, 15 aa, synthetic construct
CASLIAAQDYYFDYW

SEQ ID NO: 1803 - protein, 14 aa, synthetic construct
CATYCSSTSCFDYW

SEQ ID NO: 1804 - protein, 14 aa, synthetic construct
CARELGYSSTVWPW

SEQ ID NO: 1805 - protein, 18 aa, synthetic construct
CASLLHTGPSGGNYFDYW

SEQ ID NO: 1806 - protein, 14 aa, synthetic construct
CARVSSGDYGMDVW

SEQ ID NO: 1807 - protein, 11 aa, synthetic construct
CAKVDSGYDYW

SEQ ID NO: 1808 - protein, 20 aa, synthetic construct
CHGLGEGDPYGDYEGYFDLW

SEQ ID NO: 1809 - protein, 15 aa, synthetic construct
CAREVLRQQVVLDYW

SEQ ID NO: 1810 - protein, 24 aa, synthetic construct
CAGLHYYYDSSGYNPTEYYGMDVW

SEQ ID NO: 1811 - protein, 15 aa, synthetic construct
CTHVQNSYYYAMDVW

SEQ ID NO: 1812 - protein, 21 aa, synthetic construct
CTTLGAVYFDSSGYHDYFDYW

SEQ ID NO: 1813 - protein, 15 aa, synthetic construct
CFGLLEVYDMTFDYW

SEQ ID NO: 1814 - protein, 16 aa, synthetic construct
CASLGYCSGGSCFDYW

SEQ ID NO: 1815 - protein, 16 aa, synthetic construct
CAALGILFGYDAFDIW

SEQ ID NO: 1816 - protein, 19 aa, synthetic construct
CAKEGYYDSTGYRTYFQQW

SEQ ID NO: 1817 - protein, 12 aa, synthetic construct
CATTGTVTLGYW

SEQ ID NO: 1818 - protein, 16 aa, synthetic construct [sequence omitted]

SEQ ID NO: 1819 - protein, 13 aa, synthetic construct
CARVTNYDAFDIW

SEQ ID NO: 1820 - protein, 18 aa, synthetic construct
CARDSGEHFWDSGYIDHW

SEQ ID NO: 1821 - protein, 11 aa, synthetic construct
CARVDSRFDYW

SEQ ID NO: 1822 - protein, 13 aa, synthetic construct
CARVDDFGYFDLW

SEQ ID NO: 1823 - protein, 19 aa, synthetic construct
CGRHWGIYDSSGFSSFDYW

SEQ ID NO: 1824 - protein, 11 aa, synthetic construct
CASVDGYFDYW

SEQ ID NO: 1825 - protein, 14 aa, synthetic construct
CARALGVTYQFDYW

SEQ ID NO: 1826 - protein, 14 aa, synthetic construct
CASFSGGPADFDYW

SEQ ID NO: 1827 - protein, 17 aa, synthetic construct
CLSVTGDTEDYGVFDTW

SEQ ID NO: 1828 - protein, 15 aa, synthetic construct
CAHWSWELGDWFDPW

SEQ ID NO: 1829 - protein, 18 aa, synthetic construct
CAGLLRYSGTYYDAFDVW

SEQ ID NO: 1830 - protein, 12 aa, synthetic construct
CAGLGWNYMDYW

SEQ ID NO: 1831 - protein, 13 aa, synthetic construct
CATHNSLSGFDYW

SEQ ID NO: 1832 - protein, 12 aa, synthetic construct
CWRLGNDYFDYW

SEQ ID NO: 1833 - protein, 12 aa, synthetic construct
CGGGYGYHFDYW

SEQ ID NO: 1834 - protein, 22 aa, synthetic construct
CWMYYYDSSGYYGNYYYGMDVW

SEQ ID NO: 1835 - protein, 22 aa, synthetic construct
CARGNTKYYYDSSGYSSAFDYW

SEQ ID NO: 1836 - protein, 15 aa, synthetic construct
CWIVGPGPLDGMDVW

SEQ ID NO: 1837 - protein, 16 aa, synthetic construct
CVHLASQTGAGYFDLW

SEQ ID NO: 1838 - protein, 13 aa, synthetic construct
CARYDFWSGYPYW

SEQ ID NO: 1839 - protein, 17 aa, synthetic construct
CAREILWFGEFGEPNVW

SEQ ID NO: 1840 - protein, 16 aa, synthetic construct
CARLHYYDSSGYFDYW

SEQ ID NO: 1841 - protein, 15 aa, synthetic construct
CARDSSATRTGPDYW

SEQ ID NO: 1842 - protein, 12 aa, synthetic construct
CARLGGEGFDYW

SEQ ID NO: 1843 - protein, 15 aa, synthetic construct
CARGLLWFGELFGYW

SEQ ID NO: 1844 - protein, 16 aa, synthetic construct
CVRHSGTDGDSSFDYW

SEQ ID NO: 1845 - protein, 11 aa, synthetic construct
CARFFRAHDYW

SEQ ID NO: 1846 - protein, 11 aa, synthetic construct
CARADYDFDYW

SEQ ID NO: 1847 - protein, 17 aa, synthetic construct
CAKFGRKIVGATELDYW

SEQ ID NO: 1848 - protein, 19 aa, synthetic construct
CARSPSFSQIYYYYYMDVW

SEQ ID NO: 1849 - protein, 20 aa, synthetic construct
CAVVAMRMVTTEGPDVLDVW

SEQ ID NO: 1850 - protein, 20 aa, synthetic construct
CAREGYYYDSSGYPYYFDYW

SEQ ID NO: 1851 - protein, 14 aa, synthetic construct
CARLSQGMVALDYW

SEQ ID NO: 1852 - protein, 17 aa, synthetic construct
CAKDGGYGELHYGMEVW

SEQ ID NO: 1853 - protein, 8 aa, synthetic construct [sequence omitted]

SEQ ID NO: 1854 - protein, 10 aa, synthetic construct
CALFGDFDYW

SEQ ID NO: 1855 - protein, 14 aa, synthetic construct
CVRLSSGYFDFDYW

SEQ ID NO: 1856 - protein, 13 aa, synthetic construct
CARFAGWDAFDIW

SEQ ID NO: 1857 - protein, 15 aa, synthetic construct
CARLSSDGYNYFDFW

SEQ ID NO: 1858 - protein, 11 aa, synthetic construct
CTTVDQYFNYW

SEQ ID NO: 1859 - protein, 16 aa, synthetic construct
CATGECDGGSCSLAYW

SEQ ID NO: 1860 - protein, 15 aa, synthetic construct
CVRFGSSWARDLDQW

SEQ ID NO: 1861 - protein, 9 aa, synthetic construct
CTETGTAAW

SEQ ID NO: 1862 - protein, 18 aa, synthetic construct
CLKVLGGDYEADNWFDYW

SEQ ID NO: 1863 - protein, 18 aa, synthetic construct
CARSLYYDRSGSYYFDYW

SEQ ID NO: 1864 - protein, 22 aa, synthetic construct
CARDIGYYDSSGYYNDGGFDYW

SEQ ID NO: 1865 - protein, 21 aa, synthetic construct
CAGHATFGGSSSSYYYGMDVW

SEQ ID NO: 1866 - protein, 12 aa, synthetic construct
CLRLSSSGFDHW

SEQ ID NO: 1867 - protein, 20 aa, synthetic construct
CAKSDGLMGELRSASAFDIW

SEQ ID NO: 1868 - protein, 11 aa, synthetic construct
CTHANDYGDYW

SEQ ID NO: 1869 - protein, 15 aa, synthetic construct
CARLLVREDWYFDLW

SEQ ID NO: 1870 - protein, 11 aa, synthetic construct
CAYNNSSGEYW

SEQ ID NO: 1871 - protein, 14 aa, synthetic construct
CAGDYNFWSGFDHW

SEQ ID NO: 1872 - protein, 14 aa, synthetic construct
CAKKLGGYYAFDIW

SEQ ID NO: 1873 - protein, 11 aa, synthetic construct [sequence omitted]

SEQ ID NO: 1874 - protein, 12 aa, synthetic construct
CAIEIVVGGIYW

SEQ ID NO: 1875 - protein, 11 aa, synthetic construct
CATDLYYMDVW

SEQ ID NO: 1876 - protein, 14 aa, synthetic construct
CTTFNWNDEGFDYW

SEQ ID NO: 1877 - protein, 20 aa, synthetic construct
CARERYWNPLPYYYYGMDVW

SEQ ID NO: 1878 - protein, 24 aa, synthetic construct
CARGPFYMYCSGTKCYSTNWFDPW

SEQ ID NO: 1879 - protein, 17 aa, synthetic construct
CARGEIDILTGYWYDYW

SEQ ID NO: 1880 - protein, 21 aa, synthetic construct
CTTLLYYYDSSGYSFDAFDIW

SEQ ID NO: 1881 - protein, 21 aa, synthetic construct
CTALLYYFDNSGYNFDPFDIW

SEQ ID NO: 1882 - protein, 18 aa, synthetic construct
CAARRSQILFTSRTDYEW

SEQ ID NO: 1883 - protein, 22 aa, synthetic construct
CAAVNTFDESAYAAFACYDVVW

SEQ ID NO: 1884 - protein, 18 aa, synthetic construct
CAASSVFSDLRYRKNPKW

SEQ ID NO: 1885 - protein, 9 aa, synthetic construct
CAIAGRGRW

SEQ ID NO: 1886 - protein, 18 aa, synthetic construct
CAKTKRTGIFTTARMVDW

SEQ ID NO: 1887 - protein, 24 aa, synthetic construct
CAIEPGTIRNWRNRVPFARGNFGW

SEQ ID NO: 1888 - protein, 13 aa, synthetic construct
CAARRWIPPGPIW

SEQ ID NO: 1889 - protein, 17 aa, synthetic construct
CAAKRLRSFASGGSYDW

SEQ ID NO: 1890 - protein, 18 aa, synthetic construct
CAARRRVTLFTSRADYDW

SEQ ID NO: 1891 - protein, 13 aa, synthetic construct
CAARRWIPPGPIW

SEQ ID NO: 1892 - protein, 18 aa, synthetic construct
CAAKGIWDYLGRRDFGDW

SEQ ID NO: 1893 - protein, 23 aa, synthetic construct
CARQTFDFWSASLGGNFWYFDLW

SEQ ID NO: 1894 - protein, 9 aa, synthetic construct [sequence omitted]

SEQ ID NO: 1895 - protein, 16 aa, synthetic construct
CTRGGGRFFDWLYLRW

SEQ ID NO: 1896 - protein, 21 aa, synthetic construct
CARGHGRYFDWLLFARPPDYW

SEQ ID NO: 1897 - protein, 16 aa, synthetic construct
CAKRTIFGVGRWLDPW

SEQ ID NO: 1898 - protein, 20 aa, synthetic construct
CSKDRAPNCFACCPNGFDVW

SEQ ID NO: 1899 - protein, 12 aa, synthetic construct
CARGRFLGGTEW

SEQ ID NO: 1900 - protein, 18 aa, synthetic construct
CARGRTIFFGGGRYFDYW

SEQ ID NO: 1901 - protein, 25 aa, synthetic construct
CARGARIFGSVAPWRGGNYYGMDVW

SEQ ID NO: 1902 - protein, 15 aa, synthetic construct
CARASGLWFRRPHVW

SEQ ID NO: 1903 - protein, 21 aa, synthetic construct
CARVSRRPRSPPGYYYGMDVW

SEQ ID NO: 1904 - protein, 20 aa, synthetic construct
CTRARLRYFDWLFPTNFDYW

SEQ ID NO: 1905 - protein, 17 aa, synthetic construct
CARRVRRLWFRSYFDLW

SEQ ID NO: 1906 - protein, 16 aa, synthetic construct
CARERARWFGKFSVSW

SEQ ID NO: 1907 - protein, 11 aa, synthetic construct
SACGRLGFGAW

SEQ ID NO: 1908 - protein, 21 aa, synthetic construct
CARGGPPRLWGSYRRKYFDYW

SEQ ID NO: 1909 - protein, 13 aa, synthetic construct
CARGLGWLLGYYW

SEQ ID NO: 1910 - protein, 17 aa, synthetic construct
CTTSARSGWFWRYFDSW

SEQ ID NO: 1911 - protein, 20 aa, synthetic construct
CARRGLLQWFGAPNSWFDPW

SEQ ID NO: 1912 - protein, 19 aa, synthetic construct
CTTERDGLLWFRELFRPSW

SEQ ID NO: 1913 - protein, 16 aa, synthetic construct
CAKVHSYVWGGHSDYW

SEQ ID NO: 1914 - protein, 20 aa, synthetic construct
CARVRFSRLGGVIGRPIDSW

SEQ ID NO: 1915 - protein, 16 aa, synthetic construct
CAKDRGVLWFGELWYW

SEQ ID NO: 1916 - protein, 24 aa, synthetic construct
CASGKGGSATIFHLSRRPLYFDYW

SEQ ID NO: 1917 - protein, 20 aa, synthetic construct
CAKRKNRGPLWFGGGGWGYW

SEQ ID NO: 1918 - protein, 21 aa, synthetic construct
CARRVAYSSFWSGLRKHMDVW

SEQ ID NO: 1919 - protein, 14 aa, synthetic construct
CASRRRWLTPYIFW

SEQ ID NO: 1920 - protein, 12 aa, synthetic construct
CAAISIFGRLKW

SEQ ID NO: 1921 - protein, 21 aa, synthetic construct
CARVGPLRFLAQRPRLRPDYW

SEQ ID NO: 1922 - protein, 15 aa, synthetic construct
CAREWGRWLQRGSYW

SEQ ID NO: 1923 - protein, 24 aa, synthetic construct
CARGSGSGFMWYHGNNNYDRWRYW

SEQ ID NO: 1924 - protein, 19 aa, synthetic construct
CARGRYDFWSGYYRWFDPW

SEQ ID NO: 1925 - protein, 22 aa, synthetic construct
CATVPPPRRFLEWLPRRLTYIW

SEQ ID NO: 1926 - protein, 13 aa, synthetic construct
CARMSGFPFLDYW

SEQ ID NO: 1927 - protein, 18 aa, synthetic construct
CARTRGIFLWFGESFDYW

SEQ ID NO: 1928 - protein, 18 aa, synthetic construct
CARGGPRFGGFRGYFDPW

SEQ ID NO: 1929 - protein, 14 aa, synthetic construct
CARVTRWFGGLDVW

SEQ ID NO: 1930 - protein, 18 aa, synthetic construct
CARHHGLGILWWGTMDVW

SEQ ID NO: 1931 - protein, 15 aa, synthetic construct
CAKRSTWLPQHFDSW

SEQ ID NO: 1932 - protein, 16 aa, synthetic construct
CARGVRGVFRAYFDHW

SEQ ID NO: 1933 - protein, 23 aa, synthetic construct
CARGTSFFNFWSGSLGRVGFDSW

SEQ ID NO: 1934 - protein, 18 aa, synthetic construct
CTTAGVLRYFDWFRRPYW

SEQ ID NO: 1935 - protein, 21 aa, synthetic construct
CTTDGLRYFDWFPWASAFDIW

SEQ ID NO: 1936 - protein, 13 aa, synthetic construct
CARKGRWSGMNVW

SEQ ID NO: 1937 - protein, 21 aa, synthetic construct
CARSTGPRGSGRYRAHWFDSW

SEQ ID NO: 1938 - protein, 13 aa, synthetic construct
CSPSSWPFYFGAW

SEQ ID NO: 1939 - protein, 24 aa, synthetic construct
CARGTPWRLLWFGTLGPPPAFDYW

SEQ ID NO: 1940 - protein, 16 aa, synthetic construct
CARQHQDFWTGYYTVW

SEQ ID NO: 1941 - protein, 18 aa, synthetic construct
CAKEGWRWLQLRGGFDYW

SEQ ID NO: 1942 - protein, 17 aa, synthetic construct
CARRGKLSAAMHWFDPW

SEQ ID NO: 1943 - protein, 13 aa, synthetic construct
CARDRGIFGVSRW

SEQ ID NO: 1944 - protein, 11 aa, synthetic construct
CARGSGWWEYW

SEQ ID NO: 1945 - protein, 19 aa, synthetic construct
CARGFGRRFLEWLPRFDYW

SEQ ID NO: 1946 - protein, 16 aa, synthetic construct
CAHFRRFLPRGYVDYW

SEQ ID NO: 1947 - protein, 22 aa, synthetic construct
CARQQYYDFWSGYFRSGYFDLW

SEQ ID NO: 1948 - protein, 22 aa, synthetic construct
CATVPPPRRFLEWLPRRLTYTW

SEQ ID NO: 1949 - protein, 17 aa, synthetic construct
CAKERESRFLKWRKTDW

SEQ ID NO: 1950 - protein, 17 aa, synthetic construct
CARHDSIGLFRHGMDVW

SEQ ID NO: 1951 - protein, 20 aa, synthetic construct
CARDRGFGFWSGLRGYFDLW

SEQ ID NO: 1952 - protein, 20 aa, synthetic construct
CAKRKKRGPLWFGGGGWGYW

SEQ ID NO: 1953 - protein, 12 aa, synthetic construct
CARRHWFGFDYW

SEQ ID NO: 1954 - protein, 11 aa, synthetic construct
RASQSIHRFLN

SEQ ID NO: 1955 - protein, 11 aa, synthetic construct
RASQTINTYLN

SEQ ID NO: 1956 - protein, 11 aa, synthetic construct
RASQNIHTYLN

SEQ ID NO: 1957 - protein, 11 aa, synthetic construct
RASQSIDTYLN

SEQ ID NO: 1958 - protein, 11 aa, synthetic construct
RASQSIHTYLN

SEQ ID NO: 1959 - protein, 11 aa, synthetic construct
RASQSIDTYLN

SEQ ID NO: 1960 - protein, 11 aa, synthetic construct
RASQSIDTYLN

SEQ ID NO: 1961 - protein, 11 aa, synthetic construct
RASQSIDTYLN

SEQ ID NO: 1962 - protein, 11 aa, synthetic construct
RASQRIGTYLN

SEQ ID NO: 1963 - protein, 11 aa, synthetic construct
RASQSIHISLN

SEQ ID NO: 1964 - protein, 11 aa, synthetic construct
RASQSIGNYLN

SEQ ID NO: 1965 - protein, 11 aa, synthetic construct
RASQSIDNYLN

SEQ ID NO: 1966 - protein, 11 aa, synthetic construct
RASQSIDTYLN

SEQ ID NO: 1967 - protein, 11 aa, synthetic construct
RASQSIDTYLN

SEQ ID NO: 1968 - protein, 11 aa, synthetic construct
RASQSIDNYLN

SEQ ID NO: 1969 - protein, 11 aa, synthetic construct
RASQTIYSYLN

SEQ ID NO: 1970 - protein, 11 aa, synthetic construct
RTSQSINTYLN

SEQ ID NO: 1971 - protein, 11 aa, synthetic construct
RASRSISRYLN

SEQ ID NO: 1972 - protein, 11 aa, synthetic construct
RASRSIRRYLN

SEQ ID NO: 1973 - protein, 11 aa, synthetic construct
RASQSIGRYLN

SEQ ID NO: 1974 - protein, 11 aa, synthetic construct
RASQSIGKYLN

SEQ ID NO: 1975 - protein, 11 aa, synthetic construct
RASQSIGRYLN

SEQ ID NO: 1976 - protein, 11 aa, synthetic construct
RASQSIGRYLN

SEQ ID NO: 1977 - protein, 11 aa, synthetic construct
RASQSIGRYLN

SEQ ID NO: 1978 - protein, 11 aa, synthetic construct
RASQSIRKYLN

SEQ ID NO: 1979 - protein, 11 aa, synthetic construct
RASQSIGKYLN

SEQ ID NO: 1980 - protein, 11 aa, synthetic construct
RASQSIGKYLN

SEQ ID NO: 1981 - protein, 11 aa, synthetic construct
RASQSIGKYLN

SEQ ID NO: 1982 - protein, 11 aa, synthetic construct
RASQSIGKYLN

SEQ ID NO: 1983 - protein, 11 aa, synthetic construct
RASQNIKTYLN

SEQ ID NO: 1984 - protein, 11 aa, synthetic construct
RASQSIHRFLN

SEQ ID NO: 1985 - protein, 11 aa, synthetic construct
RASQSIHISLN

SEQ ID NO: 1986 - protein, 11 aa, synthetic construct
RASQSIHTYLN

SEQ ID NO: 1987 - protein, 11 aa, synthetic construct
RASQTINTYLN

SEQ ID NO: 1988 - protein, 11 aa, synthetic construct
RASQSIDTYLN

SEQ ID NO: 1989 - protein, 11 aa, synthetic construct
RASQSIGNYLN

SEQ ID NO: 1990 - protein, 11 aa, synthetic construct
RASQSIDTYLN

SEQ ID NO: 1991 - protein, 11 aa, synthetic construct
RASQSIDNYLN

SEQ ID NO: 1992 - protein, 11 aa, synthetic construct
RASQSIDTYLN

SEQ ID NO: 1993 - protein, 11 aa, synthetic construct
RASQSIDTYLN

SEQ ID NO: 1994 - protein, 11 aa, synthetic construct
RASQSIDTYLN

SEQ ID NO: 1995 - protein, 11 aa, synthetic construct
RASQSIDTYLN

SEQ ID NO: 1996 - protein, 11 aa, synthetic construct
RASQSIDNYLN

SEQ ID NO: 1997 - protein, 11 aa, synthetic construct
RASQRIGTYLN

SEQ ID NO: 1998 - protein, 14 aa, synthetic construct
TGTSSDVGSYDLVS

SEQ ID NO: 1999 - protein, 14 aa, synthetic construct
TGTSSDVGSSNLVS

SEQ ID NO: 2000 - protein, 14 aa, synthetic construct
TGTSSDIGSYNLVS

SEQ ID NO: 2001 - protein, 14 aa, synthetic construct
TGTSTDVGSYNLVS

SEQ ID NO: 2002 - protein, 14 aa, synthetic construct
TGTSSNVGSYNLVS

SEQ ID NO: 2003 - protein, 11 aa, synthetic construct
RASQSIHTYLN

SEQ ID NO: 2004 - protein, 11 aa, synthetic construct
RASQSIHTYLN

SEQ ID NO: 2005 - protein, 11 aa, synthetic construct
RASQTINTFLN

SEQ ID NO: 2006 - protein, 11 aa, synthetic construct
RASQTIRTYLN

SEQ ID NO: 2007 - protein, 11 aa, synthetic construct
RSSQSISSYLN

SEQ ID NO: 2008 - protein, 11 aa, synthetic construct
RASQSISGSLN

SEQ ID NO: 2009 - protein, 11 aa, synthetic construct
RASRSISTYLN

SEQ ID NO: 2010 - protein, 11 aa, synthetic construct
RASQSIHTYLN

SEQ ID NO: 2011 - protein, 11 aa, synthetic construct
RASQSIRKYLN

SEQ ID NO: 2012 - protein, 11 aa, synthetic construct
RASQNIKTYLN

SEQ ID NO: 2013 - protein, 11 aa, synthetic construct
RASQTIYSYLN

SEQ ID NO: 2014 - protein, 11 aa, synthetic construct
RASRSIRRYLN

SEQ ID NO: 2015 - protein, 11 aa, synthetic construct
RASQSIGKYLN

SEQ ID NO: 2016 - protein, 11 aa, synthetic construct
RASRSISRYLN

SEQ ID NO: 2017 - protein, 11 aa, synthetic construct
RASQSIGKYLN

SEQ ID NO: 2018 - protein, 11 aa, synthetic construct
RASQSIGRYLN

SEQ ID NO: 2019 - protein, 11 aa, synthetic construct
RASQSIGRYLN

SEQ ID NO: 2020 - protein, 11 aa, synthetic construct
RASQSIGKYLN

SEQ ID NO: 2021 - protein, 11 aa, synthetic construct
RASQSIGRYLN

SEQ ID NO: 2022 - protein, 11 aa, synthetic construct
RTSQSINTYLN

SEQ ID NO: 2023 - protein, 11 aa, synthetic construct
RASQSIGKYLN

SEQ ID NO: 2024 - protein, 11 aa, synthetic construct
RASQSIGKYLN

SEQ ID NO: 2025 - protein, 11 aa, synthetic construct
RASQSIGRYLN

SEQ ID NO: 2026 - protein, 11 aa, synthetic construct
RASQIIGSYLN

SEQ ID NO: 2027 - protein, 11 aa, synthetic construct
RASQSISRYIN

SEQ ID NO: 2028 - protein, 11 aa, synthetic construct
RASQSIYTYLN

SEQ ID NO: 2029 - protein, 11 aa, synthetic construct
RASQSIATYLN

SEQ ID NO: 2030 - protein, 11 aa, synthetic construct
RASQNINTYLN

SEQ ID NO: 2031 - protein, 11 aa, synthetic construct
RASQGIATYLN

SEQ ID NO: 2032 - protein, 11 aa, synthetic construct
RASERISNYLN

SEQ ID NO: 2033 - protein, 11 aa, synthetic construct
RASQSISSSLN

SEQ ID NO: 2034 - protein, 11 aa, synthetic construct
RASQSISSHLN

SEQ ID NO: 2035 - protein, 11 aa, synthetic construct
RASQSISSYLI

SEQ ID NO: 2036 - protein, 11 aa, synthetic construct
RASPSISTYLN

SEQ ID NO: 2037 - protein, 11 aa, synthetic construct
RASQNIAKYLN

SEQ ID NO: 2038 - protein, 11 aa, synthetic construct
RASQSIGTYLN

SEQ ID NO: 2039 - protein, 11 aa, synthetic construct
RASQSISPYLN

SEQ ID NO: 2040 - protein, 7 aa, synthetic construct
AASNLHS

SEQ ID NO: 2041 - protein, 7 aa, synthetic construct
SASTLQS

SEQ ID NO: 2042 - protein, 7 aa, synthetic construct
AASTFAK

SEQ ID NO: 2043 - protein, 7 aa, synthetic construct
AASALAS

SEQ ID NO: 2044 - protein, 7 aa, synthetic construct
AASALAS

SEQ ID NO: 2045 - protein, 7 aa, synthetic construct
AASALAS

SEQ ID NO: 2046 - protein, 7 aa, synthetic construct
AASALAS

SEQ ID NO: 2047 - protein, 7 aa, synthetic construct
AASALAS

SEQ ID NO: 2048 - protein, 7 aa, synthetic construct
AASNLEG

SEQ ID NO: 2049 - protein, 7 aa, synthetic construct
LASPLAS

SEQ ID NO: 2050 - protein, 7 aa, synthetic construct
GVSSLQS

SEQ ID NO: 2051 - protein, 7 aa, synthetic construct
GVSALQS

SEQ ID NO: 2052 - protein, 7 aa, synthetic construct
GASALES

SEQ ID NO: 2053 - protein, 7 aa, synthetic construct
GVSALQS

SEQ ID NO: 2054 - protein, 7 aa, synthetic construct
GVSALQS

SEQ ID NO: 2055 - protein, 7 aa, synthetic construct
ATSTLQG

SEQ ID NO: 2056 - protein, 7 aa, synthetic construct
GASNVQS

SEQ ID NO: 2057 - protein, 7 aa, synthetic construct
AASSLQA

SEQ ID NO: 2058 - protein, 7 aa, synthetic construct
ASSSLQA

SEQ ID NO: 2059 - protein, 7 aa, synthetic construct
AASSLKS

SEQ ID NO: 2060 - protein, 7 aa, synthetic construct
ASSSLQS

SEQ ID NO: 2061 - protein, 7 aa, synthetic construct
ASSSLQS

SEQ ID NO: 2062 - protein, 7 aa, synthetic construct
AASSLKS

SEQ ID NO: 2063 - protein, 7 aa, synthetic construct
AASSLKS

SEQ ID NO: 2064 - protein, 7 aa, synthetic construct
ASSTLQR

SEQ ID NO: 2065 - protein, 7 aa, synthetic construct
ASSTLQR

SEQ ID NO: 2066 - protein, 7 aa, synthetic construct
ASSTLQR

SEQ ID NO: 2067 - protein, 7 aa, synthetic construct
ASSTLQR

SEQ ID NO: 2068 - protein, 7 aa, synthetic construct
ASSTLQR

SEQ ID NO: 2069 - protein, 7 aa, synthetic construct
AASKLQS

SEQ ID NO: 2070 - protein, 7 aa, synthetic construct
AASNLHS

SEQ ID NO: 2071 - protein, 7 aa, synthetic construct
LASPLAS

SEQ ID NO: 2072 - protein, 7 aa, synthetic construct
AASALAS

SEQ ID NO: 2073 - protein, 7 aa, synthetic construct
SASTLQS

SEQ ID NO: 2074 - protein, 7 aa, synthetic construct
AASALAS

SEQ ID NO: 2075 - protein, 7 aa, synthetic construct
GVSSLQS

SEQ ID NO: 2076 - protein, 7 aa, synthetic construct
AASALAS

SEQ ID NO: 2077 - protein, 7 aa, synthetic construct
GVSALQS

SEQ ID NO: 2078 - protein, 7 aa, synthetic construct
GASALES

SEQ ID NO: 2079 - protein, 7 aa, synthetic construct
AASALAS

SEQ ID NO: 2080 - protein, 7 aa, synthetic construct
GVSALQS

SEQ ID NO: 2081 - protein, 7 aa, synthetic construct
AASALAS

SEQ ID NO: 2082 - protein, 7 aa, synthetic construct
GVSALQS

SEQ ID NO: 2083 - protein, 7 aa, synthetic construct
AASNLEG

SEQ ID NO: 2084 - protein, 7 aa, synthetic construct
EGNKRPS

SEQ ID NO: 2085 - protein, 7 aa, synthetic construct
EGSKRPS

SEQ ID NO: 2086 - protein, 7 aa, synthetic construct
EGTKRPS

SEQ ID NO: 2087 - protein, 7 aa, synthetic construct
EGTKRPS

SEQ ID NO: 2088 - protein, 7 aa, synthetic construct
EGTKRPS

SEQ ID NO: 2089 - protein, 7 aa, synthetic construct
AASALAS

SEQ ID NO: 2090 - protein, 7 aa, synthetic construct
AASALAS

SEQ ID NO: 2091 - protein, 7 aa, synthetic construct
SASTLQS

SEQ ID NO: 2092 - protein, 7 aa, synthetic construct
DASTLQR

SEQ ID NO: 2093 - protein, 7 aa, synthetic construct
GASRLRS

SEQ ID NO: 2094 - protein, 7 aa, synthetic construct
AESRLHS

SEQ ID NO: 2095 - protein, 7 aa, synthetic construct
AASNLQG

SEQ ID NO: 2096 - protein, 7 aa, synthetic construct
AASALAS

SEQ ID NO: 2097 - protein, 7 aa, synthetic construct
ASSTLQR

SEQ ID NO: 2098 - protein, 7 aa, synthetic construct
AASKLQS

SEQ ID NO: 2099 - protein, 7 aa, synthetic construct
ATSTLQG

SEQ ID NO: 2100 - protein, 7 aa, synthetic construct
ASSSLQA

SEQ ID NO: 2101 - protein, 7 aa, synthetic construct
ASSSLQS

SEQ ID NO: 2102 - protein, 7 aa, synthetic construct
AASSLQA

SEQ ID NO: 2103 - protein, 7 aa, synthetic construct
ASSTLQR

SEQ ID NO: 2104 - protein, 7 aa, synthetic construct
ASSSLQS

SEQ ID NO: 2105 - protein, 7 aa, synthetic construct
AASSLKS

SEQ ID NO: 2106 - protein, 7 aa, synthetic construct
ASSTLQR

SEQ ID NO: 2107 - protein, 7 aa, synthetic construct
AASSLKS

SEQ ID NO: 2108 - protein, 7 aa, synthetic construct
GASNVQS

SEQ ID NO: 2109 - protein, 7 aa, synthetic construct
ASSTLQR

SEQ ID NO: 2110 - protein, 7 aa, synthetic construct
ASSTLQR

SEQ ID NO: 2111 - protein, 7 aa, synthetic construct
AASSLKS

SEQ ID NO: 2112 - protein, 7 aa, synthetic construct
TTSNLQS

SEQ ID NO: 2113 - protein, 7 aa, synthetic construct
EASSLES

SEQ ID NO: 2114 - protein, 7 aa, synthetic construct
SASNLHS

SEQ ID NO: 2115 - protein, 7 aa, synthetic construct
GASSLEG

SEQ ID NO: 2116 - protein, 7 aa, synthetic construct
SASSLQS

SEQ ID NO: 2117 - protein, 7 aa, synthetic construct
YASNLQS

SEQ ID NO: 2118 - protein, 7 aa, synthetic construct
TASNLES

SEQ ID NO: 2119 - protein, 7 aa, synthetic construct
AASRLQD

SEQ ID NO: 2120 - protein, 7 aa, synthetic construct
RASTLQS

SEQ ID NO: 2121 - protein, 7 aa, synthetic construct
AASRLHS

SEQ ID NO: 2122 - protein, 7 aa, synthetic construct
TASRLQT

SEQ ID NO: 2123 - protein, 7 aa, synthetic construct
GASGLQS

SEQ ID NO: 2124 - protein, 7 aa, synthetic construct
AASNLHS

SEQ ID NO: 2125 - protein, 7 aa, synthetic construct
KASSLQS

SEQ ID NO: 2126 - protein, 11 aa, synthetic construct
CQQSYGLPPTF

SEQ ID NO: 2127 - protein, 10 aa, synthetic construct [sequence omitted]

SEQ ID NO: 2128 - protein, 12 aa, synthetic construct [sequence omitted]

SEQ ID NO: 2129 - protein, 12 aa, synthetic construct [sequence omitted]

SEQ ID NO: 2130 - protein, 12 aa, synthetic construct [sequence omitted]

SEQ ID NO: 2131 - protein, 12 aa, synthetic construct [sequence omitted]

SEQ ID NO: 2132 - protein, 12 aa, synthetic construct [sequence omitted]

SEQ ID NO: 2133 - protein, 12 aa, synthetic construct [sequence omitted]

SEQ ID NO: 2134 - protein, 11 aa, synthetic construct
CQQNYSTTWTF

SEQ ID NO: 2135 - protein, 12 aa, synthetic construct [sequence omitted]

SEQ ID NO: 2136 - protein, 11 aa, synthetic construct [sequence omitted]

SEQ ID NO: 2137 - protein, 12 aa, synthetic construct
CQQSHSAPPYFF

SEQ ID NO: 2138 - protein, 12 aa, synthetic construct
CQQSHSAPPYFF

SEQ ID NO: 2139 - protein, 12 aa, synthetic construct
CQQSYSAPPYFF

SEQ ID NO: 2140 - protein, 11 aa, synthetic construct [sequence omitted]

SEQ ID NO: 2141 - protein, 7 aa, synthetic construct [sequence omitted]

SEQ ID NO: 2142 - protein, 11 aa, synthetic construct [sequence omitted]

SEQ ID NO: 2143 - protein, 11 aa, synthetic construct [sequence omitted]

SEQ ID NO: 2144 - protein, 11 aa, synthetic construct [sequence omitted]

SEQ ID NO: 2145 - protein, 11 aa, synthetic construct [sequence omitted]

SEQ ID NO: 2146 - protein, 11 aa, synthetic construct [sequence omitted]

SEQ ID NO: 2147 - protein, 11 aa, synthetic construct [sequence omitted]

SEQ ID NO: 2148 - protein, 11 aa, synthetic construct [sequence omitted]

SEQ ID NO: 2149 - protein, 11 aa, synthetic construct [sequence omitted]

SEQ ID NO: 2150 - protein, 11 aa, synthetic construct [sequence omitted]

SEQ ID NO: 2151 - protein, 11 aa, synthetic construct
CQQSLSPPFTF

SEQ ID NO: 2152 - protein, 11 aa, synthetic construct [sequence omitted]

SEQ ID NO: 2153 - protein, 11 aa, synthetic construct
CQQSFSPPFTF

SEQ ID NO: 2154 - protein, 11 aa, synthetic construct [sequence omitted]

SEQ ID NO: 2155 - protein, 11 aa, synthetic construct [sequence omitted]

SEQ ID NO: 2156 - protein, 11 aa, synthetic construct
CQQSYGLPPTF

SEQ ID NO: 2157 - protein, 12 aa, synthetic construct [sequence omitted]

SEQ ID NO: 2158 - protein, 12 aa, synthetic construct [sequence omitted]

SEQ ID NO: 2159 - protein, 10 aa, synthetic construct [sequence omitted]

SEQ ID NO: 2160 - protein, 12 aa, synthetic construct [sequence omitted]

SEQ ID NO: 2161 - protein, 11 aa, synthetic construct [sequence omitted]

SEQ ID NO: 2162 - protein, 12 aa, synthetic construct [sequence omitted]

SEQ ID NO: 2163 - protein, 12 aa, synthetic construct
CQQSHSAPPYFF

SEQ ID NO: 2164 - protein, 12 aa, synthetic construct
CQQSHSAPPYFF

SEQ ID NO: 2165 - protein, 12 aa, synthetic construct [sequence omitted]

SEQ ID NO: 2166 - protein, 12 aa, synthetic construct
CQQSYSAPPYFF

SEQ ID NO: 2167 - protein, 12 aa, synthetic construct [sequence omitted]

SEQ ID NO: 2168 - protein, 11 aa, synthetic construct [sequence omitted]

SEQ ID NO: 2169 - protein, 11 aa, synthetic construct
CQQNYSTTWTF

SEQ ID NO: 2170 - protein, 11 aa, synthetic construct [sequence omitted]

SEQ ID NO: 2171 - protein, 11 aa, synthetic construct [sequence omitted]

SEQ ID NO: 2172 - protein, 12 aa, synthetic construct [sequence omitted]

SEQ ID NO: 2173 - protein, 13 aa, synthetic construct [sequence omitted]

SEQ ID NO: 2174 - protein, 13 aa, synthetic construct [sequence omitted]

SEQ ID NO: 2175 - protein, 12 aa, synthetic construct [sequence omitted]

SEQ ID NO: 2176 - protein, 12 aa, synthetic construct [sequence omitted]

SEQ ID NO: 2177 - protein, 10 aa, synthetic construct [sequence omitted]

SEQ ID NO: 2178 - protein, 12 aa, synthetic construct [sequence omitted]

SEQ ID NO: 2179 - protein, 11 aa, synthetic construct
CQQGYSAPWTF

SEQ ID NO: 2180 - protein, 11 aa, synthetic construct [sequence omitted]

SEQ ID NO: 2181 - protein, 11 aa, synthetic construct [sequence omitted]

SEQ ID NO: 2182 - protein, 12 aa, synthetic construct [sequence omitted]

SEQ ID NO: 2183 - protein, 11 aa, synthetic construct [sequence omitted]

SEQ ID NO: 2184 - protein, 11 aa, synthetic construct [sequence omitted]

SEQ ID NO: 2185 - protein, 7 aa, synthetic construct [sequence omitted]

SEQ ID NO: 2186 - protein, 11 aa, synthetic construct [sequence omitted]

SEQ ID NO: 2187 - protein, 11 aa, synthetic construct [sequence omitted]

SEQ ID NO: 2188 - protein, 11 aa, synthetic construct [sequence omitted]

SEQ ID NO: 2189 - protein, 11 aa, synthetic construct
CQQSLSPPFTF

SEQ ID NO: 2190 - protein, 11 aa, synthetic construct [sequence omitted]

SEQ ID NO: 2191 - protein, 11 aa, synthetic construct [sequence omitted]

SEQ ID NO: 2192 - protein, 11 aa, synthetic construct [sequence omitted]

SEQ ID NO: 2193 - protein, 11 aa, synthetic construct [sequence omitted]

SEQ ID NO: 2194 - protein, 11 aa, synthetic construct [sequence omitted]

SEQ ID NO: 2195 - protein, 11 aa, synthetic construct
CQQSFSPPFTF

SEQ ID NO: 2196 - protein, 11 aa, synthetic construct [sequence omitted]

SEQ ID NO: 2197 - protein, 11 aa, synthetic construct [sequence omitted]

SEQ ID NO: 2198 - protein, 11 aa, synthetic construct [sequence omitted]

SEQ ID NO: 2199 - protein, 11 aa, synthetic construct [sequence omitted]

SEQ ID NO: 2200 - protein, 11 aa, synthetic construct [sequence omitted]

SEQ ID NO: 2201 - protein, 11 aa, synthetic construct
CQQTFSSPFTF

SEQ ID NO: 2202 - protein, 11 aa, synthetic construct
CQQSSLTPWTF

SEQ ID NO: 2203 - protein, 11 aa, synthetic construct [sequence omitted]

SEQ ID NO: 2204 - protein, 11 aa, synthetic construct [sequence omitted]

SEQ ID NO: 2205 - protein, 11 aa, synthetic construct [sequence omitted]

SEQ ID NO: 2206 - protein, 11 aa, synthetic construct [sequence omitted]

SEQ ID NO: 2207 - protein, 11 aa, synthetic construct
CQQGYNTPRTF

SEQ ID NO: 2208 - protein, 11 aa, synthetic construct
CQQTYSTPSSF

SEQ ID NO: 2209 - protein, 11 aa, synthetic construct
CQQSHSPPITF

SEQ ID NO: 2210 - protein, 11 aa, synthetic construct
CQESYSAPYTF

SEQ ID NO: 2211 - protein, 11 aa, synthetic construct [sequence omitted]

SEQ ID NO: 2212 - protein, 123 aa, synthetic construct
EVQLLESGGGLVQPGGSLRLSCAASGFTFSSYAMNWVRQAPGKGLEWVSAISGSGVSTYYADSVKGRFTISRDNSKNTLYLQMNSLRAEDTAVYYCAKGDSGSYYGSSYFDYWGQGTLVTVSS

SEQ ID NO: 2213 - protein, 130 aa, synthetic construct
EVQLLESGGGLVQPGGSLRLSCAASGFTFSSYGMSWVRQAPGKGLEWVSAISGSGGNTYYADSVKGRFTISRDNSKNTLYLQMNSLRAEDTAVYYCTRVRRGSGVAPYSSSWGRYYFDYWGQGTLVTVSS

SEQ ID NO: 2214 - protein, 127 aa, synthetic construct
EVQLLESGGGLVQPGGSLRLSCAASGFRFSSYSMSWVRQAPGKGLEWVSAISGSGGSSYYADSVKGRFTISRDNSKNTLYLQMNSLRAEDTAVYYCAKDGSGTIFGVVIAKYYFDYWGQGTLVTVSS

SEQ ID NO: 2215 - protein, 123 aa, synthetic construct
EVQLLESGGGLVQPGGSLRLSCAASGFTFSAYAMSWVRQAPGKGLEWVSAISGSGGSTHYADSVKGRFTISRDNSKNTLYLQNSLRAEDTAVYYCASWGPLWSGSPNDAFDIWGQGTLVTVSS

SEQ ID NO: 2216 - protein, 126 aa, synthetic construct
EVQLLESGGGLVQPGGSLRLSCAASGFFSSYAMGWVRQAPGKGLEWVSAISGSGYSTYYADSVKGRFTISRDNSKNTLYLQMNSLRAEDTAVYYCARVRSYDSTAYDEPLDALDIWGQGTLVTVSS

SEQ ID NO: 2217 - protein, 124 aa, synthetic construct
EVQLLESGGGLVQPGGSLRLSCAASGFTFSSFAMSWVRQAPGKGLEWVSAISGSGVSTYYADSVKGRFTISRDNSKNTLYLQMNSLRAEDTAVYYCGRDARSSGYNGYDLFDIWGQGTLVTVSS

SEQ ID NO: 2218 - protein, 117 aa, synthetic construct
EVQLLESGGGLVQPGGSLRLSCAASGFTFSAYAMSWRQAPGKGLEWVSAISGSGGSYYADSVKGRFTISRDNSKNTLYLQMNSLRAEDTAVYYCAKGPLVGWYFDLWGQGTLVTVSS

SEQ ID NO: 2219 - protein, 124 aa, synthetic construct
EVQLLESGGGLVQPGGSLRLSCAASGFTFGSYAMSWVRQAPGKGLEWVSLISGSGGSTYYADSVKGRFTISRDNSKNTLYLQMNSLRAEDTAVYYCASWGPLWSGSPNDAFDIWGQGTLVTVSS

SEQ ID NO: 2220 - protein, 123 aa, synthetic construct
EVQLLESGGGLVQPGGSLRLSCAASGFTFSAYAMSWVRQAPGKGLEWVSAISGSGGSTFYADSVKGRFTISRDNSKNTLYLQMNSLRAEDTAVYYCTRQGDSSGWYDGWFDPWGQGTLVTVSS

SEQ ID NO: 2221 - protein, 117 aa, synthetic construct
EVQLLESGGGLVQPGGSLRLSCAASGFIFSSYAMSWVRQAPGKGLEWVSIISGSGGSTYYADSVKGRFTISRDNSKNTLYLQMNSLRAEDTAVYYCIATVVSPLDYWGQGTLVTVSS

SEQ ID NO: 2222 - protein, 121 aa, synthetic construct
EVQLLESGGGLVQPGGSLRLSCAASGFTFSDYAMSWVRQAPGKGLEWVSTISGSGGSTYYADSVKGRFTISRDNSKNTLYLQMNSLRAEDTAVYYCARDESSSSLNWFDPWGQGTLVTVSS

SEQ ID NO: 2223 - protein, 121 aa, synthetic construct
EVQLLESGGGLVQPGGSLRLSCAASGFTFSSYAMIWVRQAPGKGLEWVSAISGSAGSTYYADSVKGRFTISRDNSKNTLYLQMNSLRAEDTAVYYCASPDPLGSVADLDYWGQGTLVTVSS

SEQ ID NO: 2224 - protein, 119 aa, synthetic construct
EVQLLESGGGLVQPGGSLRLSCAASGFTFGSYAMSWVRQAPGKGLEWVSAISGSGGTTYYADSVKGRFTISRDNSKNTLYLQMNSLRAEDTAVYYCARVWSSSSVFDYWGQGTLVTVSS

SEQ ID NO: 2225 - protein, 120 aa, synthetic construct
EVQLLESGGGLVQPGGSLRLSCAASGFTFSRYAMSWRQAPGKGLEWVSAISGSGASTYYADSVKGRFTISRDNKNTLYLQMNSLRAEDTAVYYCAKDRGGGSYYGTFDYWGQGTLVTVSS

SEQ ID NO: 2226 - protein, 124 aa, synthetic construct
EVQLLESGGGLVQPGGSLRLSCAASGSTFSSYAMSWVRQAPGKGLEWVSAISGSGATYYADSVKGRFTISRDNSKNTLYLQMNSLRAEDTAVYYCTRVRVAGYSSSWYDAFDIWGQGTLVTVSS

SEQ ID NO: 2227 - protein, 124 aa, synthetic construct
EVQLLESGGGLVQPGGSLRLSCAASGFTFSSYAMTWVRQAPGKGLEWVSAISGSGGNTYYADSVKGRFTISRDNSKNTLYLQMNSLRAEDTAVYYCVKGTIPIFGVIRSAFDYWGQGTLVTVSS

SEQ ID NO: 2228 - protein, 119 aa, synthetic construct
EVQLLESGGGLVQPGGSLRLSCAASGFTFSSYVMSWVRQAPGKGLEWVSSISGSGGSTYYADSVKGRFTISRDNSKNTLYLQMNSLRAEDTAVYYCARGSGSYSFFDYWGQGTLVTVSS

SEQ ID NO: 2229 - protein, 124 aa, synthetic construct
EVQLLESGGGLVQPGGSLRLSCAASGFTFSSYANWVRQAPGKGLEWVSAISGSGVSTYYADSVKGRFTISRDNSKNTLYLQMNSLRAEDTAVYYCATTPGPWIQLWFGGGFDYWGQGTLVTVSS

SEQ ID NO: 2230 - protein, 120 aa, synthetic construct
EVQLLESGGGLVQPGGSLRLSCAASGFTFSSYDMSWVRQAPGKGLEWVSAISGSAGSTTMRDSVKGRFTISRDNSKNTLYLQMNSLRAEDTAVYYCAKDGLVVAGTFDYWGQGTLVTVSS

SEQ ID NO: 2231 - protein, 121 aa, synthetic construct
EVQLLESGGGLVQPGGSLRLSCAASGFTFSGYAMSWVRQAPGKGLEWVSALSGSGGSTYYADSVKGRFTISRDNSKNTLYLQMNSLRAEDTAVYYCARGALLEWLSRFDNWGQGTLVTVSS

SEQ ID NO: 2232 - protein, 118 aa, synthetic construct
EVQLLESGGGLVQPGGSLRLSCAASGFTLSSYAMSWVRQAPGKGLEWVSAISGSGGTTYYADSVKGFTISRDNSKNTLYLQMNSLRAEDTAVYYCARDLGAADLIDYWGQGTLVTVSS

SEQ ID NO: 2233 - protein, 123 aa, synthetic construct
EVQLLESGGGLVQPGGSLRLSCAASGFIFSSYAMSWVRQAPGKGLEWISAISGSGGTYYADSVKGRFTISRDNSKNTLYLQMNSPRAEDTAVYYCVRVPAAAGKGVPGIFDIWGQGTLVTVSS

SEQ ID NO: 2234 - protein, 123 aa, synthetic construct
EVQLLESGGGLVQPGGSLRLSCAASGFTFSSYAMGWVRQAPGKGLEWVSAIRGSGGSTYYADSVKGRFTISRDNSKNTLYLQMNSLRAEDTAVYYCARVRQGLRRTWYYFDYWGQGTLVTVSS

SEQ ID NO: 2235 - protein, 118 aa, synthetic construct
EVQLLESGGGLVQPGGSLRLSCAASGSTFSSYAMSWVRQAPGKGLEWVSAIGGSGGSTYYADSVKGRFTISRDNSKNTLYLQMNSLRAEDTAVYYCAKEYSSSWFDPWGQGTLVTVSS

SEQ ID NO: 2236 - protein, 121 aa, synthetic construct
EVQLLESGGGLVQPGGSLSCAASGFTFSSYTMSWVRQAPGKGLEWVSAISVSGGSTYYADSVKGRFTISRDNSKNTLYLQMNSLRAEDTAVYYCAKREDYDFWSGRGAFDIWGQGTLVTIS

SEQ ID NO: 2237 - protein, 120 aa, synthetic construct
EVQLLESGGGLVQPGGSLRLSCAASGFTFSSYAMYWVRQAPGKGLEWVSAISGSGGTYYADSVKGRFTISRDNSKNTLYLQMNSLRAEDTAVYYCAKDIGYSSSWSFDYWGQGTLVTVSS

SEQ ID NO: 2238 - protein, 119 aa, synthetic construct
EVQLLESGGGLVQPGGSLRLSCAASGFTFRSYAMSWVRQAPGKGLEWVSAISGSGRSTYYASVKGRFTISRDNSKNTLYLQMNSLRAEDTAVYYCARDDYSDYRPFDYWGQGTLVTVSS

SEQ ID NO: 2239 - protein, 122 aa, synthetic construct
EVQLLESGGGLVQPGGSLRLSCAASGFTFSSYTMSWVRQAPGKGLEWVSAISGSGGSIYYADSVKGRFTISRDNSKNTLYLQMNSLRAEDTAVYYCAHRPSLQWLDWWFDPWGQGTLVTVSS

SEQ ID NO: 2240 - protein, 122 aa, synthetic construct
EVQLLESGGGLVQPGGSLRLSCAASGFTFSSQAMSWVRQAPGKGLEWVSIISGSGGSTYYADSVKGRFTISRDNSKNTLYLQMNSLRAEDTAVYYCAKDGASGWPNWHFDLWGQGTLVTVSS

SEQ ID NO: 2241 - protein, 118 aa, synthetic construct
EVQLLESGGGLVQPGGSLRLSCAASGFTFSSYPMSWVRQAPGKGLEWVSAISGSGGRTYYADSVKGRFTISRDNSKNTLYLQMNSLRAEDTAVYYCAKGAAAGPFDYWGQGTLVTVSS

SEQ ID NO: 2242 - protein, 122 aa, synthetic construct
EVQLLESGGGLVQPGGSLRLSCAASGFTFSSYAMTWVRQAPGKGLEWVSAISGGTTYYADSVKGRFTISRDNSKNTLYLQMNSLRAEDTAVYYCAKEEYYYDSSGPNWFDPWGQGTLVTVSS

SEQ ID NO: 2243 - protein, 121 aa, synthetic construct
EVQLLESGGGLVQPGGSLRLSCAASGFTFSSYAMSWVRQAPGKGLEWVTAISVSGGSTYYADSVKGRFTISRDNSKNTLYLQNSLKTQETAGYYWAPQGGTTVPTGRFDPWGQRTLVTVSS

SEQ ID NO: 2244 - protein, 122 aa, synthetic construct
EVQLLESGGGLVQPGGSLRLSCAASGFTFSSYAMSWVRQAPGKGLEWVSAISGSSGSTYYADSVKGRFTISRDNSKNTLYLQMNSLRAEDTAVYYCSRGGGPAAGFHGLDVWGQGTLVTVSS

SEQ ID NO: 2245 - protein, 124 aa, synthetic construct
EVQLLESGGGLVQPGGSLRLSCAASGFTFSSYAVSWVRQAPGKGLEWVSAISASGGSTYYADSVKGRFTISRDNSKNTLYLQMNSLRAEDTAVYYCARAAKRQQLFPRNYFDYWGQGTLVTVSS

SEQ ID NO: 2246 - protein, 119 aa, synthetic construct
EVQLLESGGGLVQPGGSLRLSCAASGFTFSSYPMSWVRQAPGKGLEWVSAIRGSGGSTYYADSVKGRFTISRDNSKNTLYLQMNSLRAEDTAVYYCALHYGSGRSFDYWGQGTLVTVSS

SEQ ID NO: 2247 - protein, 124 aa, synthetic construct
EVQLLESGGGLVQPGGSLRLSCAASGFTFSSYGMSWVRQAPGKGLEWVSAISGSGGATYYADSVKGRFTISRDNSKNTLYLQMNSLRAEDTAVYYCARPGGRIVGALWGAFDYWGQGTLVTVSS

SEQ ID NO: 2248 - protein, 120 aa, synthetic construct
EVQLVESGGGLVQPGGSLRLSCAASGRTFCRYSMGWFRQAPGKERELVATWRPANTNYADSVKGRFTISADNSKNTAYLQMNSLKPEDTAVYYCAKNWGDAGTTWFEKSGWGQGTLVTSS

SEQ ID NO: 2249 - protein, 114 aa, synthetic construct
EVQLVESGGGLVQPGGSLRLSCAASGNIFSRYIMGWFRQAPGKERELVAAISRTGGSTYYADSVKGRFTISADNSKNTAYLQMNSLKPEDTAVYYCAIDPDGEWGQGTLVTVSS

SEQ ID NO: 2250 - protein, 118 aa, synthetic construct
EVQLVESGGGLVQPGGSLRLSCAASGRTLAGYTMGWFRQAPGKERELLAEIYPSGNGVYYADSVKGRFTISADNSKNTAYLQMNSLKPEDTAVYYCAADVRDSIWRSWGQGTLVTVSS

SEQ ID NO: 2251 - protein, 121 aa, synthetic construct
EVQLVESGGGLVQPGGSLRLSCAASGSTLSRYSMGWFRQAPGKEREFVAAIARRERVYADSVKGRFTISADNSKNTAYLQMNSLKPEDTAVYYCARLSCHDYSCYSAFDFWGQGTLVTVSS

SEQ ID NO: 2252 - protein, 118 aa, synthetic construct
EVQLVESGGGLVQPGGSLRLSCAASGSIFSSAAMGWFRQAPGKEREFEAISWRTGTTYYADSVKGRFTISADNSKNTAYLQMNSLKPEDTAVYYCAAAGSMGWNHLRDYDWGQGTLVT

SEQ ID NO: 2253 - protein, 120 aa, synthetic construct
EVQLVESGGGLVQPGGSLRLSCAATFSGYLMGWFRQAPGKEREFVAGIWRSGVSLYYADSVKGRFTISADNSKNTAYLQMNSLKPEDTAVYYCAARSGWGAAMRSADFRWGQGTLVTVSS

SEQ ID NO: 2254 - protein, 123 aa, synthetic construct
EVQLVESGGGLVQPGGSLRLSCAASGRTFSSYDMGWFRQAPGKERERVAIIKSDGSTYYADSVKGRFTISADNSKNTAYLQMNSLKPEDTAVYYCARSPRFSGVVVRPGLDLWGQGTLVTVSS

SEQ ID NO: 2255 - protein, 120 aa, synthetic construct
EVQLVESGGGLVQPGGSLRLSCAASGSISSYFMGWFRQAPGKEREWVSSIGIAGTPTLYADSVKGRFTISADNSKNTAYLQMNSLKPEDTAVYYCAACSDYYCSGVGAVWGQGTLVTVSS

SEQ ID NO: 2256 - protein, 127 aa, synthetic construct
EVQLVESGGGLVQPGGSLRLSCAASGPTFSTYAMGWFRQAPGKEREFVAAVINGGTTNYADSVKGRFTISADNSKNTAYLQMNSLKPEDTAVYYCAKDSWDSSGYSYHYYYYGMDVWGQGTLVTVSS

SEQ ID NO: 2257 - protein, 119 aa, synthetic construct
EVQLVESGGGLVQPGGSLRLSCAASGIIGSFRTMGWFRQAPGKERELAGFTGSGRSQYYADSVKGRFTISADNSKNTAYLQMNSLKPEDTAVYYCARGDIAVIQVLDYWGQGTLVTVSS

SEQ ID NO: 2258 - protein, 115 aa, synthetic construct
EVQLVESGGGLVQPGGSLRLSCAASGGTFASYGMGWFRQAPGKEREWVAGIWEDSSAAHYAESVKGRFTISADNSKNTAYLQMNSLKPEDTAVYYCAYSGIGTDWGQGTLVTVSS

SEQ ID NO: 2259 - protein, 114 aa, synthetic construct
EVQLVESGGGLVQPGGSLRLSCAASGLTFRNYAMGWFRQAPGKERELVAGITSGGTRNYADSVKGRFTISADNSKNTAYLQMNSLKPEDTAVYYCAAGWGDSAWGQGTLVTVSS

SEQ ID NO: 2260 - protein, 117 aa, synthetic construct
EVQLVESGGGLVQPGGSLRLSCAASGSISTINVMGWFRQAPGKEREFVAAISWGGGLTVYADSVKGRFTISADNSKNTAYLQMNSLKPEDTAVYYCAAFDGYTGSDWGQGTLVTVSS

SEQ ID NO: 2261 - protein, 123 aa, synthetic construct
EVQLVESGGGLVQPGGSLRLSCAASGGTLSSYIGWFRQAPGKERELVATVRSGSITNYADSVKGRFTISADNSKNTAYLQMNSLKPEDTAVYYCAADLTDIWEGIREYDEYAWGQGTLVTVSS

SEQ ID NO: 2262 - protein, 117 aa, synthetic construct
EVQLVESGGGLVQPGGSLRLSCAASGRTFRRYPMGWFRQAPGKEREFVVAVTWSGGSTYYADSVKGRFTISADNSKNTAYLQMNSLKPEDTAVYYCAAGLRGRQYSWGQGTLVTVSS

SEQ ID NO: 2263 - protein, 117 aa, synthetic construct
EVQLVESGGGLVQPGGSLRLSCAASGSTFSIDVMGWFRQAPGKEREFVAAISWSGESTLYADSVKGRFTISADNSKNTAYLQMNSLKPEDTAVYYCAAFDGYSGSDWGQGTLVTVSS

SEQ ID NO: 2264 - protein, 120 aa, synthetic construct
EVQLVESGGGLVQPGGSLRLSCAASGRTSSSAVMGWFRQAPGKEREFVAAINRGGSTIYVDSVKGRFTISADNSKNTAYLQMNSLKPEDTAVYYCATGPYRSYFARSYLWGQGTLVTVSS

SEQ ID NO: 2265 - protein, 124 aa, synthetic construct
EVQLVESGGGLVQPGGSLRLSCAASGGTFSSYRMGWFRQAPGKEREWVSAISWNDGGADYADSVKGRFTISADNSKNTAYLQMNSLKPEDTAVYYCAATQWGSSGWKQARWYDWGQGTLVTVSS

SEQ ID NO: 2266 - protein, 123 aa, synthetic construct
EVQLVESGGGLVQPGGSLRLSCAASGTIFASAMGWFRQAPGKERELVAFSSSGGSTYYADSVKGRFTISADNSKNTAYLQMNSLKPEDTAVYYCAKDPIAAADPGDSVSFDYWGQGTLVTVSS

SEQ ID NO: 2267 - protein, 117 aa, synthetic construct
EVQLVESGGGLVQPGGSLRLSCAASGFGIDAMGWFRQAPGKEREFVATITEGGATNVGSTSYSVKGRFTISADNSKNTAYLQMNSLKPEDTAVYYCALNVWRTSSDWGQGTLVTVSS

SEQ ID NO: 2268 - protein, 117 aa, synthetic construct
EVQLVESGGGLVQPGGSLRLSCAASGNIIGGNHMGWFRQAPGKEREFVGAITSSRSTVYADSVKGRFTISADNSKNTAYLQMNSLKPEDTAVYYCAAVTTQTYGYDWGQGTLVTVSS

SEQ ID NO: 2269 - protein, 119 aa, synthetic construct
EVQLVESGGGLVQPGGSLRLSCAASGRTFSRYDMGWFRQAPGKEREFVGGTRSGSTNYADSVKGRFTISADNSKNTAYLQMNSLKPEDTAVYYCARHSDYSGLSNFDYWGQGTLVTVSS

SEQ ID NO: 2270 - protein, 125 aa, synthetic construct
EVQLVESGGGLVQPGGSLRLSCAAGRQPAPELRGYGMGWFRQAPGKEREFVAAVIGSSGTTYYADSVKGRFTISADNSKNTAYLQMNSLKPEDTAVYYCAKAKATVGLRAPFDYWGQGTLVTVSS

SEQ ID NO: 2271 - protein, 117 aa, synthetic construct
EVQLVESGGGLVQPGGSLRLSCAASGINFSRYGMGWFRQAPGKEREFVASITYLGRTNYADSVKGRFTISADNSKNTAYLQMNSLKPEDTAVYYCALRVRPYGQYDWGQGTLVTVSS

SEQ ID NO: 2272 - protein, 125 aa, synthetic construct
EVQLVESGGGLVQPGGSLRLSCAASGRTFRRYAMGWFRQAPGKEREFVAAINWSGARTYYADSVKGRFTISADNSKNTAYLQMNSLKPEDTAVYYCAVSKPLNYYTYYDARRYDWGQGTLVTVSS

SEQ ID NO: 2273 - protein, 125 aa, synthetic construct
EVQLVESGGGLVQPGGSLRLSCAASGGTFGHYAMGWFRQAPGKEREFVAAVSWSGSSTYYADSVKGRFTISADNSKNTAYLQMNSLKPEDTAVYYCAVSQPLNYYTYYDARRYDWGQGTLVTVSS

SEQ ID NO: 2274 - protein, 124 aa, synthetic construct
EVQLVESGGGLVQPGGSLRLSCAASGFTLDDYAMGWFRQAPGKEREFVAAISWSTGSTYYADSVKGRFTISADNSKNTAYLQMNSLKPEDTAVYYCAASQAPITIATMMKPFYDWGQGTLVTVS

SEQ ID NO: 2275 - protein, 116 aa, synthetic construct
EVQLVESGGGLVQPGGSLRLSCAASGFTFRRYDMGWFRQAPGKEREFVSAISGGLAYYADSVKGRFTISADNSKNTAYLQMNSLKPEDTAVYYCAVDLSGDAVYDWGQGTLVTVSS

SEQ ID NO: 2276 - protein, 116 aa, synthetic construct
EVQLVESGGGLVQPGGSLRLSCAASGINFSRNAMGWFRQAPGKERELVASITHQDRPIYADSEKGLFTITEDNKKNTDHLMMNLLKPEDTAVYYCALPVGPYGQYDWGQGTLVTWS

SEQ ID NO: 2277 - protein, 117 aa, synthetic construct
EVQLVESGGGLVQPGGSLRLSCAASGRTFTTYGMGWFRQAPGKEREFVASITYLGRTYYADSVKGRFTISADNSKNTAYLQMNSLKPEDTAVYYCALRVRPYGQYDWGQGTLVTVSS

SEQ ID NO: 2278 - protein, 123 aa, synthetic construct
EVQLVESGGGLVQPGGSLRLSCAASGSTFSINAMGWFRQAPGKEREFVAGITSSGGYTNYADSVKGRFTISADNSKNTAYLQMNSLKPEDTAVYYCAADGVPEYSDYASGPVWGQGTLVTVSS

SEQ ID NO: 2279 - protein, 124 aa, synthetic construct
EVQLLESGGGLVQPGGSLRLSCAASGFTFSNYAMRWVRQAPGKGLEWVSAISGSGGSTYYADSVRGRFTISRDNSKNTLYLQMNSLRAEDTAVYYCARHTGRYSSGSTGWFHYWGQGTLVTVSS

SEQ ID NO: 2280 - protein, 118 aa, synthetic construct
EVQLVESGGGLVQPGGSLRLSCAASGFAFSRHAMSWFRQAPGKEREFVSDIGGSGSTTYYADSVKGRFTISADNSKNTAYLQMNSLKPEDTAVYYCARTTFDNWFDPWGQGTLVTVSS

SEQ ID NO: 2281 - protein, 130 aa, synthetic construct
EVQLVESGGGLVQPGGSLRLSCAASGRTFSINAMGWFRQAPGKEREFVAGITRSAVSTITSEGTANYADSVKGRFTISADNSKNTAYLQMNSLKPEDTAVYYCAADGVPEYSDYASGPVWGQGTLVTVSS

SEQ ID NO: 2282 - protein, 118 aa, synthetic construct
EVQLLESGGGLVQPGESLRLSCAASGFTFSSYGMNWVRQAPGKGLEWVSASSGSGGSTYYADSVKGRFTISRDNSKNTLYLQMNSLRAEDTAYYCARREYIESGFDSWGQGTLVTVSS

SEQ ID NO: 2283 - protein, 123 aa, synthetic construct
EVQLVESGGGLVQPGGSLRLSCAASGRTFSTDAMGWFRQAPGKEREFVAAISSGGSTNYADSVKGRFTISADNSKNTAYLQMNSLKPEDTAVYYCAATRGRSTRLVLPSLVEWGQGTLVTVSS

SEQ ID NO: 2284 - protein, 127 aa, synthetic construct
EVQLVESGGGLVQPGGSLRLSCAASGRIFYPMGWFRQAPGKEREFVAAVRWSSTGIYYTQYADSVKGRFTISADNSKNTAYLQMNSLKPEDTAVYYCAAALSEVWRGSENLREGYDWGQGTLVTVSS

SEQ ID NO: 2285 - protein, 118 aa, synthetic construct
EVQLVESGGGLVQPGGSLRLSCAASGFTFGSYDMGWFRQAPGKEREFVTAINWSGARTAYADSVKGRFTISADNSKNTAYLQMNSLKPEDTAVYYCAARSVYSYEYNWGQGTLVTVSS

SEQ ID NO: 2286 - protein, 123 aa, synthetic construct
EVQLVESGGGLVQPGGSLRLSCAASGSTFTINAMGWFRQAPGKEREFVSGISHNGGTTNYADSVKGRFTISADNSKNTAYLQMNSLKPEDTAVYYCAADGVPEYSDYASGPVWGQGTLVTVSS

SEQ ID NO: 2287 - protein, 117 aa, synthetic construct
EVQLVESGGGLVQPGGSLRLSCAASGGTFSSIGMGWFRQAPGKEREFVAAISWDGGATAYADSVKGRFTISADNSKNTAYLQMNSLKPEDTAVYYCAKEDVGKPFDWGQGTLVTVSS

SEQ ID NO: 2288 - protein, 111 aa, synthetic construct
EVQLVESGGGLVQPGGSLRLSCAASGRTYAMGWFRQAPGKEREFVAEINWSGSSTYYADSVKGRFTISADNSKNTAYLQMNSLKPEDTAVYYCAVDGPFGWGQGTLVTVSS

SEQ ID NO: 2289 - protein, 122 aa, synthetic construct
EVQLVESGGGLVQPGGSLRLSCAASGLPFSTKSMGWFRQAPGKEREFVAAIHWSGLTSYADSVKGRFTISADNSKNTAYLQMNSLKPEDTAVYYCAADRAADFFAQRDEYDWGQGTLVTVSS

SEQ ID NO: 2290 - protein, 114 aa, synthetic construct
EVQLVESGGGLVQPGGSLRLSCAASGRTIVPYTMGWFRQAPGKEREFVAAISPSAFTEYADSVKGRFTISADNSKNTAYLQMNSLKPEDTAVYYCAARRWGYDWGQGTLVTVSS

SEQ ID NO: 2291 - protein, 114 aa, synthetic construct
EVQLVESGGGLVQPGGSLRLSCAASGLRLNMHRMGWFRQAPGKEREFVAAISGWSGGTNYADSVKGRFTISADNSKNTAYLQMNSLKPEDTAVYYCAKIGTLWWGQGTLVTVSS

SEQ ID NO: 2292 - protein, 122 aa, synthetic construct
EVQLVESGGGLVQPGGSLRLSCAASGSTFSINAMGWFRQAPGKEREFVAGISRGGTTNYADSVKGRFTISADNSKNTAYLQMNSLKPEDTAVYYCAADGVPEYSDYASGPVWGQGTLVTVSS

SEQ ID NO: 2293 - protein, 119 aa, synthetic construct
EVQLVESGGGLVQPGGSLRLSCAASGSTLPYHAMGWFRQAPGKEREFVASISRFFGTAYYADSVKGRFTISADNSKNTAYLQMNSLKPEDTAVYYCAPTFAAGASEYHWGQGTLVTVSS

SEQ ID NO: 2294 - protein, 119 aa, synthetic construct
EVQLVESGGGLVQPGGSLRLSCAASGFTFTSYAISWFRQAPGKEREFVSAISGSGGSTDYADSVKGRFTISADNSKNTAYLQMNSLKPEDTAVYYCARGAYGSGTYDYWGQGTLVTVSS

SEQ ID NO: 2295 - protein, 117 aa, synthetic construct
EVQLVESGGGLVQPGGSLRLSCAASGFSLDYYGMGWFRQAPGKEREFVAAITSGGTPHYADSVKGRFTISADNSKNTAYLQMNSLKPEDTAVYYCASAYNPGIGYDWGQGTLVTVSS

SEQ ID NO: 2296 - protein, 116 aa, synthetic construct
EVQLVESGGGLVQPGGSLRLSCAASGLTDRRYTMGWFRQAPGKEREFVASITLGGSTAYADSVKGRFTISADNSKNTAYLQMNSLKPEDTAVYYCAKEDVGKPFDWGQGTLVTVSS

SEQ ID NO: 2297 - protein, 116 aa, synthetic construct
EVQLVESGGGLVQPGGSLRLSCAASGRTFRRYTMGWFRQAPGKEREFVASITSSGVNAYADSVKGRFTISADNSKNTAYLQMNSLKPEDTAVYYCAKEDVGKPFDWGQGTLVTVSS

SEQ ID NO: 2298 - protein, 117 aa, synthetic construct
EVQLVESGGGLVQPGGSLRLSCAASGPTFSIYAMGWFRQAPGKEREFVAGISWNGGSTNYADSVKGRFTISADNSKNTAYLQMNSLKPEDTAVYYCALRRRFGGQEWGQGTLVTVSS

SEQ ID NO: 2299 - protein, 116 aa, synthetic construct
EVQLVESGGGLVQPGGSLRLSCAASGRTISRYTMGWFRQAPGKEREFVASITSGGSTAYADSVKGRFTISADNSKNTAYLQMNSLKPEDTAVYYCAKEDVGKPFDWGQGTLVTVSS

SEQ ID NO: 2300 - protein, 116 aa, synthetic construct
EVQLVESGGGLVQPGGSLRLSCAASGRTITRYTMGWFRQAPGKEREFVASITSGGSTAYADSVKGRFTISADNSKNTAYLQMNSLKPEDTAVYYCAKQDVGKPFDWGQGTLVTVSS

SEQ ID NO: 2301 - protein, 114 aa, synthetic construct
EVQLVESGGGLVQPGGSLRLSCAASGFTFENHAMGWFRQAPGKEREFVAEIYPSGSTIYADSVKGRFTISADNSKNTAYLQMNSLKPEDTAVYYCAARILSRNWGQGTLVTVSS

SEQ ID NO: 2302 - protein, 135 aa, synthetic construct
EVQLVESGGGLVQPGGSLRLSCAASGFTFSRHAMNWFRQAPGKEREFVSTITGSGGSTNYADSVKGRFTISADNSKNTAYLQMNSLKPEDTAVYYCAREVGLYYYGSGSSSRRLLGRIDYYFDYWGQGTLVTVSS

SEQ ID NO: 2303 - protein, 116 aa, synthetic construct
EVQLVESGGGLVQPGGSLRLSCAASGFTFDDYSMGWFRQAPGKEREFVASIEWDGSTYYADSVKGRFTISADNSKNTAYLQMNSLKPEDTAVYYCAAFDGYTGSDWGQGTLVTVSS

SEQ ID NO: 2304 - protein, 123 aa, synthetic construct; identical to SEQ ID NO: 2278

SEQ ID NO: 2305 - protein, 111 aa, synthetic construct
EVQLVESGGGLVQPGGSLRLSCAASGQTFNMGWFRQAPGKEREFVAEINWSGSSTYYADSVKGRFTISADNSKNTAYLQMNSLKPEDTAVYYCAVDGPFGWGQGTLVTVSS

SEQ ID NO: 2306 - protein, 118 aa, synthetic construct
EVQLVESGGGLVQPGGSLRLSCAASGNTFSDNPMGWFRQAPGKEREFVAILAWDSGSTYYADSVKGRFTISADNSKNTAYLQMNSLKPEDTAVYYCTTDYSKLAITKLSYWGQGTLVT

SEQ ID NO: 2307 - protein, 117 aa, synthetic construct
EVQLVESGGGLVQPGGSLRLSCAASGRTHSIYPMGWFRQAPGKEREFVASITSYGDTNYADSVKGRFTISADNSKNTAYLQMNSLKPEDTAVYYCAARRWIPPGPIWGQGTLVTVSS

SEQ ID NO: 2308 - protein, 120 aa, synthetic construct
EVQLVESGGGLVQPGGSLRLSCAASGRTFSMHAMGWFRQAPGKEREFVASISSQGRTNYADSVKGRFTISADNSKNTAYLQMNSLKPEDTAVYYCAAEVRNGSDYLPIDWGQGTLVTVSS

SEQ ID NO: 2309 - protein, 118 aa, synthetic construct
EVQLVESGGGLVQPGGSLRLSCAASGFTFSNYSMGWFRQAPGKEREFVAAIHWNGDSTAYADSVKGRFTISADNSKNTAYLQMNSLKPEDTAVYYCAAQTEDSAQYIWGQGTLVTVSS

SEQ ID NO: 2310 - protein, 122 aa, synthetic construct
EVQLVESGGGLVQPGGSLRLSCAASGSTFSVNAMGWFRQAPGKEREFVAGVTRGGYTNYADSVKGRFTISADNSKNTAYLQMNSLKPEDTAVYYCAADGVPEYSDYASGPVWGQGTLVTVSS

SEQ ID NO: 2311 - protein, 122 aa, synthetic construct
EVQLVESGGGLVQPGGSLRLSCAASGSIGSINAMGWFRQAPGKEREFVAGISNGGTTNYADSVKGRFTISADNSKNTAYLQMNSLKPEDTAVYYCAADGVPEYSDYASGPVWGQGTLVTVSS

SEQ ID NO: 2312 - protein, 124 aa, synthetic construct
EVQLVESGGGLVQPGGSLRLSCAASGRTFGSYDMGWFRQAPGKEREFVAFIHRSGGSTYYADSVKGRFTISADNSKNTAYLQMNSLKPEDTAVYYCATFPAIVTDSDYDLGNDWGQGTLVTVSS

SEQ ID NO: 2313 - protein, 125 aa, synthetic construct; identical to SEQ ID NO: 2273

SEQ ID NO: 2314 - protein, 118 aa, synthetic construct
EVQLVESGGGLVQPGGSLRLSCAASGFGFGSYDMGWFRQAPGKEREFVTAINWSGARAYYADSVKGRFTISADNSKNTAYLQMNSLKPEDTAVYYCAARSVYSYDYNWGQGTLVTVSS

SEQ ID NO: 2315 - protein, 123 aa, synthetic construct
EVQLVESGGGLVQPGGSLRLSCAASGSTLSINAMGWFRQAPGKEREFVAGITRSGSVTNYADSVKGRFTISADNSKNTAYLQMNSLKPEDTAVYYCAADGVPEYSDYASGPVWGQGTLVTVSS

SEQ ID NO: 2316 - protein, 123 aa, synthetic construct
EVQLVESGGGLVQPGGSLRLSCAASGRPFSEYTMGWFRQAPGKEREFVSSIHWGGRGTNYADSVKGRFTISADNSKNTAYLQMNSLKPEDTAVYYCAAELHSSDYTSPGAYAWGQGTLVTVSS

SEQ ID NO: 2317 - protein, 122 aa, synthetic construct
EVQLVESGGGLVQPGGSLRLSCAASGRTFSNYPMGWFRQAPGKEREFVAAITWSGDSTNYADSVKGRFTISADNSKNTAYLQMNSLKPEDTAVYYCALPSNIITTDYLRVYWGQGTLVTVSS

SEQ ID NO: 2318 - protein, 116 aa, synthetic construct
EVQLVESGGGLVQPGGSLRLSCAASGRTFRRYTMGWFRQAPGKEREFVASITKFGSTNYADSVKGRFTISADNSKNTAYLQMNSLKPEDTAVYYCAKEDVGKPFDWGQGTLVTVSS

SEQ ID NO: 2319 - protein, 116 aa, synthetic construct
EVQLVESGGGLVQPGGSLRLSCAASGRTFSTYVMGWFRQAPGKEREFVASISSRGITHYADSVKGRFTISADNSKNTAYLQMNSLKPEDTAVYYCAKEDVGKPFDWGQGTLVTVSS

SEQ ID NO: 2320 - protein, 117 aa, synthetic construct
EVQLVESGGGLVQPGGSLRLSCAASGFTLDYYGMGWFRQAPGKEREFVAAITSGGTPHYGDSVKGRFTISADNSKNTAYLQMNSLKPEDTAVYYCASAYNPGIGYDWGQGTLVTVSS

SEQ ID NO: 2321 - protein, 125 aa, synthetic construct
EVQLVESGGGLVQPGGSLRLSCAASGFTFGHYAMGWFRQAPGKEREFVAAVSWSGSTTYYADSVKGRFTISADNSKNTAYLQMNSLKPEDTAVYYCAVSHPLNYYTYYDARRYDWGQGTLVTVSS

SEQ ID NO: 2322 - protein, 124 aa, synthetic construct
EVQLVESGGGLVQPGGSLRLSCAASGFTFEDYAMGWFRQAPGKEREGVAAITRGSNTTDYADSVKGRFTISADNSKNTAYLQMNSLKPKDTAVYYCAARRWMGGSYFDPGNYDWGQGTLVTVSS

SEQ ID NO: 2323 - protein, 116 aa, synthetic construct
EVQLVESGGGLVQPGGSLRLSCAASGRTLSRYTMGWFRQAPGKEREFVASITSGGSTNYADSVKGRFTISADNSKNTAYLQMNSLKPEDTAVYYCAKEDVGKPFDWGQGTLVTVSS

SEQ ID NO: 2324 - protein, 128 aa, synthetic construct
EVQLVESGGGLVQPGGSLRLSCAASGRTFASYAMGWFRQAPGKEREFVGAISRSGDSTYYADSVKGRFTISADNSKNTAYLQMNSLKPEDTAVYYCARAPFYCTTTKCQDNYYYMDVWGQGTLVTVSS

SEQ ID NO: 2325 - protein, 122 aa, synthetic construct
EVQLVESGGGLVQPGGSLRLSCAASGGTYHAMGWFRQAPGKEREFVAGITSDDRTNYADSVKGRFTISADNSKNTAYLQMNSLKPEDTAVYYCARERRYYDSSGYPYYFDYWGQGTLVTVSS

SEQ ID NO: 2326 - protein, 119 aa, synthetic construct
EVQLVESGGGLVQPGGSLRLSCAASGTTLDYYAMGWFRQAPGKEREFVAAISWSGGSTAYADSVKGRFTISADNSKNTAYLQMNSLKPEDTAVYYCAREDYYDSSGYSWGQGTLVTVSS

SEQ ID NO: 2327 - protein, 118 aa, synthetic construct
EVQLVESGGGLVQPGGSLRLSCAASGGTLSRSRMGWFRQAPGKEREFVAFIGSDTLYADSVKGRFTISADNSKNTAYLQMNSLKPEDTAVYYCANLAYYDSSGYYDYWGQGTLVTVSS

SEQ ID NO: 2328 - protein, 124 aa, synthetic construct
EVQLVESGGGLVQPGGSLRLSCAASGGTFSFYNMGWFRQAPGKEREFVAFISGNGGTSYADSVKGRFTISADNSKNTAYLQMNSLKPEDTAVYYCAVVAMRMVTTEGPDVLDVWGQGTLVTVSS

SEQ ID NO: 2329 - protein, 114 aa, synthetic construct
EVQLVESGGGLVQPGGSLRLSCAASGFTFDYYAMGWFRQAPGKEREFVSAIDSEGRTSYADSVKGRFTISADNSKNTAYLQMNSLKPEDTAVYYCARWGPFDIWGQGTLVTVSS

SEQ ID NO: 2330 - protein, 122 aa, synthetic construct
EVQLVESGGGLVQPGGSLRLSCAASGFPFSIWPMGWFRQAPGKEREFVAAVRWSSTGIYYTQYADSVKGRFTISADNSKNTAYLQMNSLKPEDTAVYYCTRSEYSSGWYDYWGQGTLVTVSS

SEQ ID NO: 2331 - protein, 127 aa, synthetic construct
EVQLVESGGGLVQPGGSLRLSCAASGFAESSSMGWFRQAPGKEREFVAAISWSGDITIYADSVKGRFTISADNSKNTAYLQMNSLKPEDTAVYYCARGAPYFDHGSKSYRLFYFDYWGQGTLVTVSS

SEQ ID NO: 2332 - protein, 125 aa, synthetic construct
EVQLVESGGGLVQPGGSLRLSCAASGFTFGTTTMGWFRQAPGKEREFVAAISWSTGIAHYADSVKGRFTISADNSKNTAYLQMNSLKPEDTAVYYCARGGPNYYASGRYPWFDPWGQGTLVTVSS

SEQ ID NO: 2333 - protein, 125 aa, synthetic construct
EVQLVESGGGLVQPGGSLRLSCAASGFIGNYHAMGWFRQAPGKEREFVAAVTWSGGTTNYADSVKGRFTISADNSKNTAYLQMNSLKPEDTAVYYCAREGYYYDSSGYPYYFDYWGQGTLVTVSS

SEQ ID NO: 2334 - protein, 126 aa, synthetic construct
EVQLLESGGGLVQPGGSLRLSCAASGFTFSNYATDWVRQAPGKGLEWVSIISGSGGATYYADSVKGRFTISRDNSKNTLYLQMNSLRAEDTAVYYCAKGGYCSSDTCWWEYWLDPWGQGTLVTVSS

SEQ ID NO: 2335 - protein, 122 aa, synthetic construct
EVQLLESGGGLVQPGGSLRLSCAASGFTFSAFAMGWVRQAPGKGLEWVSAITASGDITYYADSVKGRFTISRDNSKNTLYLQMNSLRAEDTAVYYCARQSDGLPSPWHFDLGGQGTLVTVSS

SEQ ID NO: 2336 - protein, 122 aa, synthetic construct
EVQLLESGGGLVQPGGSLRLSCAASGFTFSDFAMAWVRQAPGKGLEWVSAISGSGDITYYADSVKGRFTISRDNSKNTLYLQMNSLRAEDTAVYYCAREADGLHSPWHFDLWGQGTLVTVSS

SEQ ID NO: 2337 - protein, 129 aa, synthetic construct
EVQLLESGGGLVQPGGSLRLSCAASGFTFSRHAMNWVRQAPGKGLEWVSGISGSGDETYYADSVKGRFTISRDNSKNTLYLQMNSLRAEDTAVYYCARDLPASYYDSSGYYWHNGMDVWGQGTLVTVSS

SEQ ID NO: 2338 - protein, 122 aa, synthetic construct; identical to SEQ ID NO: 2336

SEQ ID NO: 2339 - protein, 117 aa, synthetic construct
EVQLLESGGGLVQPGGSLRLSCAASGFTFSNYPMNWVRQAPGKGLEWVSTISGSGGNTFYADSVKGRFTISRDNSKNTLYLQMNSLRAEDTAVYYCVRHDEYSFDYWGQGTLVTVSS

SEQ ID NO: 2340 - protein, 122 aa, synthetic construct
EVQLLESGGGLVQPGGSLRLSCAASGFTFSDFAMAWVRQAPGKGLEWVSAITGSGDITYYADSVKGRFTISRDNSKNTLYLQMNSLRAEDTAVYYCAREADGLHSPWHFDLWGQGTLVTVSS

SEQ ID NO: 2341 - protein, 117 aa, synthetic construct
EVQLLESGGGLVQPGGSLRLSCAASGFTFSDYPMNWVRQAPGKGLEWVSTISGSGGITFYADSVKGRFTISRDNSKNTLYLQMNSLRAEDTAVYYCVRHDEYSFDYWGQGTLVTVSS

SEQ ID NO: 2342 - protein, 117 aa, synthetic construct
EVQLLESGGGLVQPGGSLRLSCAASGFTFSDYPMNWVRQAPGKGLEWVSAISGSGDNTYYADSVKGRFTISRDNSKNTLYLQMNSLRAEDTAVYYCVRHDEYSFDYWGQGTLVTVSS

SEQ ID NO: 2343 - protein, 117 aa, synthetic construct
EVQLLESGGGLVQPGGSLRLSCAASGFTFSDFAMAWVRQAPGKGLEWVSAITGTGDITYYADSVKGRFTISRDNSKNTLYLQMNSLRAEDTAVYYCAREADGLHSPWGQGTLVTVSS

SEQ ID NO: 2344 - protein, 117 aa, synthetic construct
EVQLLESGGGLVQPGGSLRLSCAASGFTFSDYPMNWVRQAPGKGLEWVSAITGSGDITYYADSVKGRFTISRDNSKNTLYLQMNSLRAEDTAVYYCVRHDEYSFDYWGQGTLVTVSS

SEQ ID NO: 2345 - protein, 122 aa, synthetic construct; identical to SEQ ID NO: 2336

SEQ ID NO: 2346 - protein, 122 aa, synthetic construct; identical to SEQ ID NO: 2336

SEQ ID NO: 2347 - protein, 116 aa, synthetic construct
EVQLLESGGGLVQPGGSLRLSCAASGFTFPRYAMSWVRQAPGKGLEWVSTISGSGSTTYYADSVKGRFTISRDNSKNTLYLQMNSLRAEDTAVYYCARLIDAFDIWGQGTLVTVSS

SEQ ID NO: 2348 - protein, 121 aa, synthetic construct
EVQLLESGGGLVQPGGSLRLSCAASGFTFSSYAMSWVRQAPGKGLEWVSVISGSGGSTYYADSVKGRFTISRDNSKNTLYLQMNSLRAEDTAVYYCAREGYRDYLWYFDLWGQGTLVTVSS

SEQ ID NO: 2349 - protein, 123 aa, synthetic construct
EVQLLESGGGLVQPGGSLRLSCAASGFTFSNYAMSWVRQAPGKGLEWVSAISGSAGSTYYADSVKGRFTISRDNSKNTLYLQMNSLRAEDTAVYYCARVRQGLRRTWYYFDYWGQGTLVTVSS

SEQ ID NO: 2350 - protein, 123 aa, synthetic construct
EVQLLESGGGLVQPGGSLRLSCAASGFTFSSYAMYWVRQAPGKGLEWVSAISGSAGSTYYADSVKGRFTISRDNSKNTLYLQMNSLRAEDTAVYYCARDTNDFWSGYSIFDPWGQGTLVTVSS

SEQ ID NO: 2351 - protein, 121 aa, synthetic construct
EVQLLESGGGLVQPGGSLRLSCAASGFTFSSYTMSWVRQAPGKGLEWVSVISGSGGSTYYADSVKGRFTISRDNSKNTLYLQMNSLRAEDTAVYYCAREGYRDYLWYFDLWGQGTLVTVSS

SEQ ID NO: 2352 - protein, 119 aa, synthetic construct
EVQLLESGGGLVQPGGSLRLSCAASGFTFSSYDMSWVRQAPGKGLEWVSVISGSGGSTYYADSVKGRFTISRDNSKNTLYLQMNSLRAEDTAVYYCAKGPLVGWYFDLWGQGTLVTVSS

SEQ ID NO: 2353 - protein, 116 aa, synthetic construct; identical to SEQ ID NO: 2347

SEQ ID NO: 2354 - protein, 122 aa, synthetic construct
EVQLLESGGGLVQPGGSLRLSCAASGFTFTTYALSWVRQAPGKGLEWVSGISGSGDETYYADSVKGRFTISRDNSKNTLYLQMNSLRAEDTAVYYCTTGDDFWSGGNWFDPWGQGTLVTVSS

SEQ ID NO: 2355 - protein, 129 aa, synthetic construct
EVQLLESGGGLVQPGGSLRLSCAASGFTFSRHAMNWVRQAPGKGLEWVSGITGSGDETYYADSVKGRFTISRDNSKNTLYLQMNSLKAEDTAVYYCARDLPASYYDSSGYYWHNGMDVWGQGTLVTVSS

SEQ ID NO: 2356 - protein, 120 aa, synthetic construct
EVQLLESGGGLVQPGGSLRLSCAASGFVFSSYAMSWVRQAPGKGLEWVSAISGSGGSSYYADSVKGRFTISRDNSKNTLYLQMNSLRAEDTAVYYCARVGGGYWYGIDVWGQGTLVTVSS

SEQ ID NO: 2357 - protein, 122 aa, synthetic construct
EVQLLESGGGLVQPGGSLRLSCAASGFTLSSYVMSWVRQAPGKGLEWVSGISGGGASTYYADSVKGRFTISRDNSKNTLYLQMNSLRAEDTAVYYCARGYSRNWYPSWFDPWGQGTLVTVSS

SEQ ID NO: 2358 - protein, 115 aa, synthetic construct
EVQLLESGGGLVQPGGSLRLSCAASGFTFSTYAMSWVRQAPGKGLEWVSSIGGSGSTTYYADSVKGRFTISRDNSKNTLYLQMNSLRAEDTAVYYCAGGWYLDYWGQGTLVTVSS

SEQ ID NO: 2359 - protein, 118 aa, synthetic construct
EVQLLGSGGGLVQPGGSLRLSCAASGFTYSNYAMTWVRQAPGKGLEWVSAISGSSGSTYYADSVKGRFTISRDNSKNTLYLQMNSLRAEDTAVYYCASLCIVDPFDIWGQGTLVTVSS

SEQ ID NO: 2360 - protein, 117 aa, synthetic construct; identical to SEQ ID NO: 2339

SEQ ID NO: 2361 - protein, 126 aa, synthetic construct
EVQLLESGGGLVQPGGSLRLSCAASGFTFRSHAMSWVRQAPGKGLEWVSSISGGGASTYYADSVKGRFTISRDNSKNTLYLQMNSLRAEDTAVYYCARVKYLTTSSGWPRPYFDNWGQGTLVTVSS

SEQ ID NO: 2362 - protein, 121 aa, synthetic construct
EVQLLESGGGLVQPGGSLRLSCAASGFTFSAYSMSWVRQAPGKGLEWVSAISGSGGSRYYADSVKGRFTISRDNSKNTLYLQMNSLRAEDTAVYYCGRSKWPQANGAFDIWGQGTLVTVSS

SEQ ID NO: 2363 - protein, 123 aa, synthetic construct
EVQLLESGGGLVQPGGSLRLSCAASGFMFGNYAMSWVRQAPGKGLEWVAAISGSGGSTYYADSVKGRFTISRDNSKNTLYLQMNSLRAEDTAVYYCAKDRGYSSSWYGGFDYWGQGTLVTVSS

SEQ ID NO: 2364 - protein, 122 aa, synthetic construct
EVQLLESGGGLVQPGGSLRLSCAASGFTFRNHAMAWVRQAPGKGLEWVSGISGSGGTTYYGDSVKGRFTISRDNSKNTLYLQMNSLRAEDTAVYYCARGTRFLQWSLPLDVWGQGTLVTVSS

SEQ ID NO: 2365 - protein, 121 aa, synthetic construct
EVQLLESGGGLVQPGGSLRLSCAASGFTIPNYAMSWVRQAPGKGLEWVSGISGAGASTYYADSVKGRFTISRDNSKNTLYLQMNSLRAEDTAVYYCARHTWWKGAGFFDHWGQGTLVTVSS

SEQ ID NO: 2366 - protein, 122 aa, synthetic construct
EVQLLESGGGLVQPGGSLRLSCAASGFTFRNYAMAWVRQAPGKGLEWVSGISGSGGTTYYGDSVKGRFTISRDNSKNTLYLQMNSLRAEDTAVYYCARGTRFLEWSLPLDVWGQGTLVTVSS

SEQ ID NO: 2367 - protein, 126 aa, synthetic construct
EVQLLESGGGLVQPGGSLRLSCAASGFTIRNYAMSWVRQAPGKGLEWVSSISGGGASTYYADSVKGRFTISRDNSKNTLYLQMNSLRAEDTAVYYCARVKYLTTSSGWPRPYFDNWGQGTLVTVSS

SEQ ID NO: 2368 - protein, 121 aa, synthetic construct
EVQLLESGGGLVQPGGSLRLSCAASGFTIPNYAMSWVRQAPGKGLEWVSGISGSGASTYYADSVKGRFTISRDNSKNTLYLQMNSLRAEDTAVYYCARHTWWKGAGFFDHWGQGTLVTVSS

SEQ ID NO: 2369 - protein, 121 aa, synthetic construct
EVQLLESGGGLVQPGGSLRLSCAASGFTITNYAMSWVRQAPGKGLEWVSGISGSGAGTYYADSVKGRFTISRDNSKNTLYLQMNSLRAEDTAVYYCARHAWWKGAGFFDHWGQGTLVTVSS

SEQ ID NO: 2370 - protein, 126 aa, synthetic construct; identical to SEQ ID NO: 2361

SEQ ID NO: 2371 - protein, 121 aa, synthetic construct
EVQLLESGGGLVQPGGSLRLSCAASGFTITNYAMSWVRQAPGKGLEWVSGISGSGASTYYADSVKGRFTISRDNSKNTLYLQMNSLRAEDTAVYYCARHTWWKGAGFFDHWGQGTLVTVSS

SEQ ID NO: 2372 - protein, 123 aa, synthetic construct
EVQLLESGGGLVQPGGSLRLSCAASGFTFRSHAMNWVRQAPGKGLEWVSAISGSGGSTNYADSVKGRFTISRDNSKNTLYLQMNSLRAEDTAVYYCARGLKFLEWLPSAFDIWGQGTLVTVSS

SEQ ID NO: 2373 - protein, 126 aa, synthetic construct; identical to SEQ ID NO: 2361

SEQ ID NO: 2374 - protein, 126 aa, synthetic construct
EVQLLESGGGLVQPGGSLRLSCAASGFTFRSYAMSWVRQAPGKGLEWVSSISGGGASTYYADSVKGRFTISRDNSKNTLYLQMNSLRAEDTAVYYCARVKYLTTSSGWPRPYFDNWGQGTLVTVSS

SEQ ID NO: 2375 - protein, 121 aa, synthetic construct
EVQLLESGGGLVQPGGSLRLSCAASGFTITNYAMSWVRQAPGKGLEWVSGISGSGAGTYYADSVKGRFTISRDNSKNTLYLQMNSLRAEDTAVYYCARHTWWKGAGFFDHWGQGTLVTVSS

SEQ ID NO: 2376 - protein, 123 aa, synthetic construct
EVQLLESGGGLVQPGGSLRLSCAASGFTFTNFAMSWVRQAPGKGLEWVSAISGRGGGTYYADSVKGRFTISRDNSKNTLYLQMNSLRAEDTAVYYCARDAHGYYYDSSGYDDWGQGTLVTVSS

SEQ ID NO: 2377 - protein, 120 aa, synthetic construct
EVQLLESGGGLVQPGGSLRLSCAASGFTFRSYPMSWVRQAPGKGLEWVSTISGSGGITYYADSVKGRFTISRDNSKNTLYLQMNSLRAEDTAVYYCAKGVYGSTVTTCHWGQGTLVTVSS

SEQ ID NO: 2378 - protein, 117 aa, synthetic construct
EVQLLESGGGLVQPGGSLRLSCAASGFTLTSYAMSWVRQAPGKGLEWVSAISGSGVDTYYADSVKGRFTISRDNSKNTLYLQMNSLRAEDTAVYYCARPTNWGFDYWGQGTLVTVSS

SEQ ID NO: 2379 - protein, 119 aa, synthetic construct
EVQLLESGGGLVQPGGSLRLSCAASGFTFINYAMSWVRQAPGKGLEWVSTISTSGGNTYYADSVKGRFTISRDNSKNTLYLQMNSLRAEDTAVYYCARADSNWASSAYWGQGTLVTVSS

SEQ ID NO: 2380 - protein, 124 aa, synthetic construct
EVQLLESGGGLVQPGGSLRLSCAASGFPFSTYAMSWVRQAPGKGLEWVSGISVSGGFTYYADSVKGRFTISRDNSKNTLYLQMNSLRAEDTAVYYCARDPYSYGYYYYYGMDVWGQGTLVTVSS

SEQ ID NO: 2381 - protein, 118 aa, synthetic construct
EVQLLESGGGLVQPGGSLRLSCAASGFTFSTYAMGWVRQAPGKGLEWVSGISGGGVSTYYADSVKGRFTISRDNSKNTLYLQMNSLRAEDTAVYYCARARNWGPSDYWGQGTLVTVSS

SEQ ID NO: 2382 - protein, 120 aa, synthetic construct
EVQLLESGGGLVQPGGSLRLSCAASGFIFSDYAMTWVRQAPGKGLEWVSAISGSAFYADSVKGRFTISRDNSKNTLYLQMNSLRAEDTAVYYCARDATYSSSWYNWFDPWGQGTLVTVSS

SEQ ID NO: 2383 - protein, 117 aa, synthetic construct
EVQLLESGGGLVQPGGSLRLSCAASGFTFSDYAMTWVRQAPGKGLEWVSDISGSGGSTYYADSVKGRFTISRDNSKNTLYLQMNSLRAEDTAVYYCARGTVTSFDFWGQGTLVTVSS

SEQ ID NO: 2384 - protein, 123 aa, synthetic construct
EVQLLESGGGLVQPGGSLRLSCAASGFTFSIYAMGWVRQAPGKGLEWVSFISGSGGSTYYADSVKGRFTISRDNSKNTLYLQMNSLRAEDTAVYYCAKDYHSASWFSAAADYWGQGTLVTVSS

SEQ ID NO: 2385 - protein, 123 aa, synthetic construct
EVQLLESGGGLVQPGGSLRLSCAASGFTFASYAMTWVRQAPGKGLEWVSAISESGGSTYYADSVKGRFTISRDNSKNTLYLQMNSLRAEDTAVYYCAREGQEYSSGSSYFDYWGQGTLVTVSS

SEQ ID NO: 2386 - protein, 126 aa, synthetic construct
EVQLLESGGGLVQPGGSLRLSCAASGFTFSEYAMSWVRQAPGKGLEWVSAITGSGGSTYYGDSVKGRFTISRDNSKNTLYLQMNSLRAEDTAVYYCARGSQTPYCGGDCPETFDYWGQGTLVTVSS

SEQ ID NO: 2387 - protein, 121 aa, synthetic construct
EVQLLESGGGLVQPGGSLRLSCAASGFTFDDYAMSWVRQAPGKGLEWVSGISGGGTSTYYADSVKGRFTISRDNSKNTLYLQMNSLRAEDTAVYYCARDLYSSGWYGFDYWGQGTLVTVSS

SEQ ID NO: 2388 - protein, 125 aa, synthetic construct
EVQLLESGGGLVQPGGSLRLSCAASGFTFNNYAMNWVRQAPGKGLEWVSAISGSVGSTYYADSVKGRFTISRDNSKNTLYLQMNSLRAEDTAVYYCARDNYDFWSGYYTNWFDPWGQGTLVTVSS

SEQ ID NO: 2389 - protein, 130 aa, synthetic construct
EVQLLESGGGLVQPGGSLRLSCAASGFTFTNHAMSWVRQAPGKGLEWVSAISGSGSNIYYADSVKGRFTISRDNSKNTLYLQMNSLRAEDTAVYYCARDSLSVTMGRGVVTYYYYGMDFWGQGTLVTVSS

SEQ ID NO: 2390 - protein, 116 aa, synthetic construct
EVQLVESGGGLVQPGGSLRLSCAASGPGTAIMGWFRQAPGKEREFVARISTSGGSTKYADSVKGRFTISADNSKNTAYLQMNSLKPEDTAVYYCARTTVTTPPLIWGQGTLVTVSS

SEQ ID NO: 2391 - protein, 116 aa, synthetic construct
EVQLVESGGGLVQPGGSLRLSCAASGRSFSNSVMGWFRQAPGKEREFVARITWNGGSTYYADSVKGRFTISADNSKNTAYLQMNSLKPEDTAVYYCATTENPNPRWGQGTLVTVSS

SEQ ID NO: 2392 - protein, 114 aa, synthetic construct
EVQLVESGGGLVQPGGSLRLSCAASGRTFGDDTMGWFRQAPGKEREFVAAVSWSGSGVYYADSVKGRFTITADNSKNTAYLQMNSLKPENTAVYYCATDPPLFWGQGTLVTVSS

SEQ ID NO: 2393 - protein, 116 aa, synthetic construct
EVQLVESGGGLVQPGGSLRLSCAASGRTFSDARMGWFRQAPGKEREFVGAVSWSGGTTVYADSVKGRFTISADNSKNTAYLQMNSLKPEDTAVYYCATTEDPYPRWGQGTLVTVSS

SEQ ID NO: 2394 - protein, 120 aa, synthetic construct
EVQLVESGGGLVQPGGSLRLSCAASGRTFGDYIMGWFRQAPGKERESVAAINWSAGYTAYADSVKGRFTISADNSKNTAYLQMNSLKPEDTAVYYCARASPNTGWHFDHWGQGTLVTVSS

SEQ ID NO: 2395 - protein, 118 aa, synthetic construct
EVQLVESGGGLVQPGGSLRLSCAASGSGLSINAMGWFRQAPGKERESVAAISWSGGSTYTAYADSVKGRFTISADNSKNTAYLQMNSLKPEDTAVYYCAAYQAGWGDWGQGTLVTVSS

SEQ ID NO: 2396 - protein, 116 aa, synthetic construct
EVQLVESGGGLVQPGGSLRLSCAASGRTFSNAAMGWFRQAPGKEREFVARILWTGASRNYADSVKGRFTISADNSKNTAYLQMNSLKPEDTAVYYCATTENPNPRWGQGTLVTVSS

SEQ ID NO: 2397 - protein, 120 aa, synthetic construct
EVQLVESGGGLVQPGGSLRLSCAASGFSLDYYGMGWFRQAPGKERESVAAISWNGDFTAYADSVKGRFTISADNSKNTAYLQMNSLKPEDTAVYYCAKRANPTGAYFDYWGQGTLVTVSS

SEQ ID NO: 2398 - protein, 125 aa, synthetic construct
EVQLVESGGGLVQPGGSLRLSCAASGFTFSRHDMGWFRQAPGKEREFVAGINWESGSTNYADSVKGRFTISADNSKNTAYLQMNSLKPEDTAVYYCAADRGVYGGRWYRTSQYTWGQGTLVTVSS

SEQ ID NO: 2399 - protein, 121 aa, synthetic construct
EVQLVESGGGLVQPGGSLRLSCAASGLTFRNYAMGWFRQAPGKEREFVAAIGSGGYTDYADSVKGRFTISADNSKNTAYLQMNSLKPEDTAVYYCAVKPGWVARDPSQYNWGQGTLVTVSS

SEQ ID NO: 2400 - protein, 117 aa, synthetic construct
EVQLVESGGGLVQPGGSLRLSCAASGGTFSRYAMGWFRQAPGKEREWVSAVDSGGSTYYADSVKGRFTISADNSKNTAYLQMNSLKPEDTAVYYCAASPSLRSAWQWGQGTLVTVSS

SEQ ID NO: 2401 - protein, 123 aa, synthetic construct
EVQLVESGGGLVQPGGSLRLSCAASGFTLDYYDMGWFRQAPGKEREFVAAVTWSGGSTYYADSVKGRFTISADNSKNTAYLQMNSLKPEDTAVYYCAADRRGLASTRAADYDWGQGTLVTVSS

SEQ ID NO: 2402 - protein, 120 aa, synthetic construct
EVQLVESGGGLVQPGGSLRLSCAASGRTFGDYIMGWFRQAPGKEREFVAAINWSAGYTPYADSVKGRFTISADNSKNTAYLQMNSLKPEDTAVYYCATAPPLFCWHFDLWGQGTLVTVSS

SEQ ID NO: 2403 - protein, 120 aa, synthetic construct
EVQLVESGGGLVQPGGSLRLSCAASGRTFGDDIMGWFRQAPGKEREFVAAIHWSAGYTRYADSVKGRFTISADNSKNTAYLQMNSLKPEDTAVYYCATDPPLFWGHVDLWGQGTLVTVSS

SEQ ID NO: 2404 - protein, 120 aa, synthetic construct
EVQLVESGGGLVQPGGSLRLSCAASGRTFGDYIMGWFRQAPGKEREIVAAINWSADYTPYADSVKGRFTISADNSKNTAYLQMNSLKPEDTAVYYCATAPPNTGWHFDHWGQGTLVTVSS

SEQ ID NO: 2405 - protein, 120 aa, synthetic construct
EVQLVESGGGLVQPGGSLRLSCAASGRTFGDYIMGWFRQAPGKEREIVAAINWSAGYTAYADSVKGRFTISADNSKNTAYLQMNSLKPEDTAVYYCATATPNTGWHFDHWGQGTLVTVSS

SEQ ID NO: 2406 - protein, 114 aa, synthetic construct
EVQLVESGGGLVQPGGSLRLSCAASGRTFSDDTMGWFRQAPGKEREFVAAINWSGGSTDYADSVKGRFTISADNSKNTAYLQMNSLKPEDTAVYYCATDPPLFWGQGTLVTVSS

SEQ ID NO: 2407 - protein, 114 aa, synthetic construct
EVQLVESGGGLVQPGGSLRLSCAASGRTFGDDTMGWFRQAPGKEREFVAGINWSGGNTYYADSVKGRFTISADNSKNTAYLQMNSLKPEDTAVYYCATDPPLFWGQGTLVTVSS

SEQ ID NO: 2408 - protein, 114 aa, synthetic construct
EVQLVESGGGLVQPGGSLRLSCAASGRTFGDYIMGWFRQAPGKEREFVAAINWTGGYTSYADSVKGRFTISADNSKNTAYLQMNSLKPEDTAVYYCATDPPLFWGQGTLVTVSS

SEQ ID NO: 2409 - protein, 114 aa, synthetic construct
EVQLVESGGGLVQPGGSLRLSCAASGRTFGDDTMGWFRQAPGKERECVAAINWSGGNTYYADSVKGRFTISADNSKNTAYLQMNSLKPEDTAVYYCATDPPLFWGQGTLVTVSS

SEQ ID NO: 2410 - protein, 114 aa, synthetic construct
EVQLVESGGGLVQPGGSLRLSCAASGRTFSDYTMGWFRQAPGKEREFVAAINWSGGYTYYADSVKGRFTISADNSKNTAYLQMNSLKPEDTAVYYCATDPPLFWGQGTLVTVSS

SEQ ID NO: 2411 - protein, 128 aa, synthetic construct
EVQLVESGGGLVQPGGSLRLSCAASGRTFGDYGMGWFRQAPGKEREFVATINWSGALTHYADSVKGRFTISADNSKNTAYLQMNSLKPEDTAVYYCATLPFYDFWSGYYTGYYYMDVWGQGTLVTVSS

SEQ ID NO: 2412 - protein, 114 aa, synthetic construct
EVQLVESGGGLVQPGGSLRLSCAASGRTFSDDTMGWFRQAPGKEREFLAGVTWSGSSTFYADSVKGRFTISADNSKNTAYLQMNSLKPEDTAVYYCATDPPLFWGQGTLVTVSS

SEQ ID NO: 2413 - protein, 114 aa, synthetic construct
EVQLVESGGGLVQPGGSLRLSCAASGRTFSDDIMGWFRQAPGKEREFVAAISWSGGNTHYADSVKGRFTISADNSKNTAYLQMNSLKPEDTAVYYCATDPPLFWGQGTLVTVSS

SEQ ID NO: 2414 - protein, 120 aa, synthetic construct
EVQLVESGGGLVQPGGSLRLSCAASGRTFGDYIMGWFRQAPGKERESVAAINWSAGYTAYADSVKGRFTISADNSKNTAYLQMNSLKPEDTAVYYCATASPNTGWHFDHWGQGTLVTVSS

SEQ ID NO: 2415 - protein, 124 aa, synthetic construct
EVQLVESGGGLVQPGGSLRLSCAASGFTFDDDYVMGWFRQAPGKEREFVAAVSGSGDDTYYADSVKGRFTISADNSKNTAYLQMNSLKPEDTAVYYCAADRRGLASTRAADYDWGQGTLVTVSS

SEQ ID NO: 2416 - protein, 120 aa, synthetic construct
EVQLVESGGGLVQPGGSLRLSCAASGRTFGDYIMGWFRQAPGKEREFVAAINWSAGYTAYADSVKGRFTISADNSKNTAYLQMNSLKPEDTAVYYCATEPPLSCWHFDLWGQGTLVTVSS

SEQ ID NO: 2417 - protein, 120 aa, synthetic construct
EVQLVESGGGLVQPGGSLRLSCAASGRTFGDYIMGWFRQAPGKEREIVAAINWSGGYTPYADSVKGRFTISADNSKNTAYLQMNSLKPEDTAVYYCATAPPNTGWHFDHWGQGTLVTVSS

SEQ ID NO: 2418 - protein, 120 aa, synthetic construct
EVQLVESGGGLVQPGGSLRLSCAASGRTFGDDTMGWFRQAPGKEREIVAAINWSAGYTPYADSVKGRFTISADNSKNTAYLQMNSLKPEDTAVYYCATDPPLFCCHFDLWGQGTLVTVSS

SEQ ID NO: 2419 - protein, 114 aa, synthetic construct
EVQLVESGGGLVQPGGSLRLSCAASGRTFSDDTMGWFRQAPGKEREFVAAISWSGGTTRYADSVKGRFTISADNSKNTAYLQMNSLKPEDTAVYYCATDPPLFWGQGTLVTVSS

SEQ ID NO: 2420 - protein, 114 aa, synthetic construct
EVQLVESGGGLVQPGGSLRLSCAASGRTFSDDTMGWFRQAPGKEREFVAAINWSGDSTYYADSVKGRFTISADNSKNTAYLQMNSLKPEDTAVYYCATDPPLFWGQGTLVTVSS

SEQ ID NO: 2421 - protein, 114 aa, synthetic construct
EVQLVESGGGLVQPGGSLRLSCAASGRTFSDDTMGWFRQAPGKEREFVAAINWSGGTTRYADSVKGRFTISADNSKNTAYLQMNSLKPEDTAVYYCATDPPLFWGQGTLVTVSS

SEQ ID NO: 2422 - protein, 114 aa, synthetic construct
EVQLVESGGGLVQPGGSLRLSCAASGRTFSDDAMGWFRQAPGKEREFVAAIHWSGSSTRYADSVKGRFTISADNSKNTAYLQMNSLKPEDTAVYYCATDPPLFWGQGTLVTVSS

SEQ ID NO: 2423 - protein, 114 aa, synthetic construct
EVQLVESGGGLVQPGGSLRLSCAASGRTFSDDTMGWFRQAPGKERELVGTINWSGGSTYYADSVKGRFTISADNSKNTAYLQMNSLKPEDTAVYYCATDPPLFWGQGTLVTVSS

SEQ ID NO: 2424 - protein, 114 aa, synthetic construct
EVQLVESGGGLVQPGGSLRLSCAASGRTFGDYIMGWFRQAPGKEREFVAAINWSGGYTPYADSVKGRFTISADNSKNTAYLQMNSLKPEDTAVYYCATDPPLFWGQGTLVTVSS

SEQ ID NO: 2425 - protein, 114 aa, synthetic construct
EVQLVESGGGLVQPGGSLRLSCAASGRTFGDDTMGWFRQAPGKERELVAAINWNGGNTHYADSVKGRFTISADNSKNTAYLQMNSLKPEDTAVYYCATDPPLFWGQGTLVTVSS

SEQ ID NO: 2426 - protein, 114 aa, synthetic construct
EVQLVESGGGLVQPGGSLRLSCAASGRTFSDDAMGWFRQAPGKEREFVAAINWSGGTTRYADSVKGRFTISADNSKNTAYLQMNSLKPEDTAVYYCATDPPLFWGQGTLVTVSS

SEQ ID NO: 2427 - protein, 120 aa, synthetic construct
EVQLVESGGGLVQPGGSLRLSCAASGRTFGDYIMGWFRQAPGKERESVAAINWSAGYTPYADSVKGRFTISADNSKNTAYLQMNSLKPEDTAVYYCATDPPLFWGHVDLWGQGTLVTVSS

SEQ ID NO: 2428 - protein, 114 aa, synthetic construct
EVQLVESGGGLVQPGGSLRLSCAASGRTFSDDTMGWFRQAPGKEREWVASINWSGGSTYYADSVKGRFTISADNSKNTAYLQMNSLKPEDTAVYYCATDPPLFWGQGTLVTVSS

SEQ ID NO: 2429 - protein, 114 aa, synthetic construct
EVQLVESGGGLVQPGGSLRLSCAASGRTFSDDAMGWFRQAPGKEREFVAGISWNGGSIYYADSVKGRFTISADNSKNTAYLQMNSLKPEDTAVYYCATDPPLFWGQGTLVTVSS

SEQ ID NO: 2430 - protein, 123 aa, synthetic construct
EVQLVESGGGLVQPGGSLRLSCAASGFTFDDYEMGWFRQAPGKEREFVAAISWRGGTTYYADSVKGRFTISADNSKNTAYLQMNSLKPEDTAVYYCAADRRGLASTRAGDYDWGQGTLVTVSS

SEQ ID NO: 2431 - protein, 120 aa, synthetic construct
EVQLVESGGGLVQPGGSLRLSCAASGRTFGDDTMGWFRQAPGKEREFVAAINWSGGYTPYADSVKGRFTISADNSKNTAYLQMNSLKPEDTAVYYCATDPPLFWGHVDLWGQGTLVTVSS

SEQ ID NO: 2432 - protein, 114 aa, synthetic construct
EVQLVESGGGLVQPGGSLRLSCAASGRTFSDDAMGWFRQAPGKEREFVAAINWSGGSTRYADSVKGRFTISADNSKNTAYLQMNSLKPEDTAVYYCATDPPLFWGQGTLVTVSS

SEQ ID NO: 2433 - protein, 128 aa, synthetic construct
EVQLVESGGGLVQPGGSLRLSCAASGVTLDDYAMGWFRQAPGKEREFVAVINWSGGSTDYADSVKGRFTISADNSKNTAYLQMNSLKPEDTAVYYCARGGGWVPSSTSESLNWYFDRWGQGTLVTVSS

SEQ ID NO: 2434 - protein, 120 aa, synthetic construct
EVQLVESGGGLVQPGGSLRLSCAASGRTFGDYIMGWFRQAPGKERESVAAINWSGGTTPYADSVKGRFTISADNSKNTAYLQMNSLKPEDTAVYYCATDPPLFCCHVDLWGQGTLVTVSS

SEQ ID NO: 2435 - protein, 114 aa, synthetic construct
EVQLVESGGGLVQPGGSLRLSCAASGLTFSDDTMGWFRQAPGKEREFVAAVSWSGGNTYYADSVKGRFTISADNSKNTAYLQMNSLKPEDTAVYYCATDPPLFWGQGTLVTVSS

SEQ ID NO: 2436 - protein, 114 aa, synthetic construct
EVQLVESGGGLVQPGGSLRLSCAASGRTFGDDTMGWFRQAPGKEREFVAAINWTGGYTPYADSVKGRFTISADNSKNTAYLQMNSLKPEDTAVYYCATDPPLFWGQGTLVTVSS

SEQ ID NO: 2437 - protein, 120 aa, synthetic construct
EVQLVESGGGLVQPGGSLRLSCAASGRTFGDYIMGWFRQAPGKEREFVATINWTAGYTYYADSVKGRFTISADNSKNTAYLQMNSLKPEDTAVYYCATDPPLFCWHFDHWGQGTLVTVSS

SEQ ID NO: 2438 - protein, 114 aa, synthetic construct
EVQLVESGGGLVQPGGSLRLSCAASGRTFGDDTMGWFRQAPGKEREFVAAINWSGGNTDYADSVKGRFTISADNSKNTAYLQMNSLKPEDTAVYYCATDPPLFWGQGTLVTVSS

SEQ ID NO: 2439 - protein, 114 aa, synthetic construct
EVQLVESGGGLVQPGGSLRLSCAASGRTFGDYTMGWFRQAPGKEREFVAAINWSGGNTYYADSVKGRFTISADNSKNTAYLQMNSLKPEDTAVYYCATDPPLFWGQGTLVTVSS

SEQ ID NO: 2440 - protein, 114 aa, synthetic construct
EVQLVESGGGLVQPGGSLRLSCAASGRTFSDDTMGWFRQAPGKEREFVAGINWSGNGVYYADSVKGRFTISADNSKNTAYLQMNSLKPEDTAVYYCATDPPLFWGQGTLVTVSS

SEQ ID NO: 2441 - protein, 114 aa, synthetic construct
EVQLVESGGGLVQPGGSLRLSCAASGRTFGDYAMGWFRQAPGKERELVAPINWSGGSTYYADSVKGRFTISADNSKNTAYLQMNSLKPEDTAVYYCATDPPLFWGQGTLVTVSS

SEQ ID NO: 2442 - protein, 118 aa, synthetic construct
EVQLVESGGGLVQPGGSLRLSCAASGGTFSNSGMGWFRQAPGKERELVAVVNWSGRRTYYADSVKGRFTISADNSKNTAYLQMNSLKPEDTAVYYCAVPWMDYNRRDWGQGTLVTVSS

SEQ ID NO: 2443 - protein, 118 aa, synthetic construct
EVQLVESGGGLVQPGGSLRLSCAASGQLANFASYAMGWFRQAPGKEREFVAAITRSGSSTVYADSVKGRFTISADNSKNTAYLQMNSLKPEDTAVYYCATTMNPNPRWGQGTLVTVSS

SEQ ID NO: 2444 - protein, 114 aa, synthetic construct
EVQLVESGGGLVQPGGSLRLSCAASGRTFSDDIMGWFRQAPGKEREFVAAINWTGGSTYYADSVKGRFTISADNSKNTAYLQMNSLKPEDTAVYYCATDPPLFWGQGTLVTVSS

SEQ ID NO: 2445 - protein, 120 aa, synthetic construct
EVQLVESGGGLVQPGGSLRLSCAASGRTFGDYIMGWFRQAPGKEREIVAAINWSAGYTAYADSVKGRFTISADNSKNTAYLQMNSLKPEDTAVYYCATARPNTGWHFDHWGQGTLVTVSS

SEQ ID NO: 2446 - protein, 114 aa, synthetic construct
EVQLVESGGGLVQPGGSLRLSCAASGRTFSDDTMGWFRQAPGKEREWVGSINWSGGSTYYADSVKGRFTISADNSKNTAYLQMNSLKPEDTAVYYCATDPPLFWGQGTLVTVSS

SEQ ID NO: 2447 - protein, 114 aa, synthetic construct
EVQLVESGGGLVQPGGSLRLSCAASGRTFSDDTMGWFRQAPGKEREFVAGMTWSGSSTFYADSVKGRFTISADNSKNTAYLQMNSLKPEDTAVYYCATDPPLFWGQGTLVTVSS

SEQ ID NO: 2448 - protein, 114 aa, synthetic construct
EVQLVESGGGLVQPGGSLRLSCAASGRTFGDYIMGWFRQAPGKERECVAAINWSGDYTDYADSVKGRFTISADNSKNTAYLQMNSLKPEDTAVYYCATDPPLFWGQGTLVTVSS

SEQ ID NO: 2449 - protein, 114 aa, synthetic construct
EVQLVESGGGLVQPGGSLRLSCAASGRTFGDYIMGWFRQAPGKEREFVGGINWSGGYTYYADSVKGRFTISADNSKNTAYLQMNSLKPEDTAVYYCATDPPLFWGQGTLVTVSS

SEQ ID NO: 2450 - protein, 114 aa, synthetic construct
EVQLVESGGGLVQPGGSLRLSCAASGRTFSDDTMGWFRQAPGKEREFVAAVNWSGGSTYYADSVKGRFTISADNSKNTAYLQMNSLKPEDTAVYYCATDPPLFWGQGTLVTVSS

SEQ ID NO: 2451 - protein, 114 aa, synthetic construct
EVQLVESGGGLVQPGGSLRLSCAASGRTFGDYAMGWFRQAPGKEREFVAAINWSGGYTRYADSVKGRFTISADNSKNTAYLQMNSLKPEDTAVYYCATDPPLFWGQGTLVTVSS

SEQ ID NO: 2452 - protein, 114 aa, synthetic construct
EVQLVESGGGLVQPGGSLRLSCAASGRTFGDDTMGWFRQAPGKEREFVAAINWSGGYTPYADSVKGRFTISADNSKNTAYLQMNSLKPEDTAVYYCATDPPLFWGQGTLVTVSS

SEQ ID NO: 2453 - protein, 120 aa, synthetic construct
EVQLVESGGGLVQPGGSLRLSCAASGRTFGDYIMGWFRQAPGKERESVAAINWSAGYTAYADSVKGRFTISADNSKNTAYLQMNSLKPEDTAVYYCARASPNTGWHFDRWGQGTLVTVSS

SEQ ID NO: 2454 - protein, 114 aa, synthetic construct
EVQLVESGGGLVQPGGSLRLSCAASGRTFGDYIMGWFRQAPGKEREFVAAINWSGGYTHYADSVKGRFTISADNSKNTAYLQMNSLKPEDTAVYYCATDPPLFWGQGTLVTVSS

SEQ ID NO: 2455 - protein, 114 aa, synthetic construct
EVQLVESGGGLVQPGGSLRLSCAASGRTFSDDTMGWFRQAPGKEREFVAAITWSGGRTRYADSVKGRFTISADNSKNTAYLQMNSLKPEDTAVYYCATDRPLFWGQGTLVTVSS

SEQ ID NO: 2456 - protein, 120 aa, synthetic construct
EVQLVESGGGLVQPGGSLRLSCAASGRTFGDYIMGWFRQAPGKERESVAAINWSGGYTAYADSVKGRFTISADNSKNTAYLQMNSLKPEDTAVYYCATASPNTGWHFDHWGQGTLVTVSS

SEQ ID NO: 2457 - protein, 114 aa, synthetic construct
EVQLVESGGGLVQPGGSLRLSCAASGRTFSDDTMGWFRQAPGKEREFVAAIHWSGSSTRYADSVKGRFTISADNSKNTAYLQMNSLKPEDTAVYYCATDPPLFWGQGTLVTVSS

SEQ ID NO: 2458 - protein, 114 aa, synthetic construct
EVQLVESGGGLVQPGGSLRLSCAASGRTFSDYTMGWFRQAPGKEREWVAAINWSGGTTYYADSVKGRFTISADNSKNTAYLQMNSLKPEDTAVYYCATDPPLFWGQGTLVTVSS

SEQ ID NO: 2459 - protein, 114 aa, synthetic construct
EVQLVESGGGLVQPGGSLRLSCAASGRTFGDDTMGWFRQAPGKEREFVAAINWSGDNTHYADSVKGRFTISADNSKNTAYLQMNSLKPEDTAVYYCATDPPLFWGQGTLVTVSS

SEQ ID NO: 2460 - protein, 118 aa, synthetic construct
EVQLVESGGGLVQPGGSLRLSCAASGFAFGDNWIGWFRQAPGKEREWVASISSGGTTAYADNVKGRFTIIADNSKNTAYLQMNSLKPEDTAVYYCAHRGGWLRPWGYWGQGTLVTVSS

SEQ ID NO: 2461 - protein, 114 aa, synthetic construct
EVQLVESGGGLVQPGGSLRLSCAASGRTFSDDAMGWFRQAPGKEREFVGRINWSGGNTYYADSVKGRFTISADNSKNTAYLQMNSLKPEDTAVYYCATDPPLFWGQGTLVTVSS

SEQ ID NO: 2462 - protein, 114 aa, synthetic construct
EVQLVESGGGLVQPGGSLRLSCAASGRTFSDDTMGWFRQAPGKEREFVGGISWSGGNTYYADSVKGRFTISADNSKNTAYLQMNSLKPEDTAVYYCATDPPLFWGQGTLVTVSS

SEQ ID NO: 2463 - protein, 114 aa, synthetic construct
EVQLVESGGGLVQPGGSLRLSCAASGRTFSDDTMGWFRQAPGKEREFVAAINWSGGSTYYADSVKGRFTISADNSKNTAYLQMNSLKPEDTAVYYCATDPPLFWGQGTLVTVSS

SEQ ID NO: 2464 - protein, 114 aa, synthetic construct
EVQLVESGGGLVQPGGSLRLSCAASGRTFGDDTMGWFRQAPGKEREFVAAINWSGGYTYYADSVKGRFTISADNSKNTAYLQMNSLKPEDTAVYYCATDPPLFWGQGTLVTVSS

SEQ ID NO: 2465 - protein, 120 aa, synthetic construct
EVQLVESGGGLVQPGGSLRLSCAASGRTFGDYIMGWFRQAPGKEREFVAAINWSADYTAYADSVKGRFTISADNSKNTAYLQMNSLKPEDTAVYYCATDPPLFCWHFDHWGQGTLVTVSS

SEQ ID NO: 2466 - protein, 114 aa, synthetic construct
EVQLVESGGGLVQPGGSLRLSCAASGRTFSDDAMGWFRQAPGKEREFVAAINWSGSSTYYADSVKGRFTISADNSKNTAYLQMNSLKPEDTAVYYCATDPPLFWGQGTLVTVSS

SEQ ID NO: 2467 - protein, 120 aa, synthetic construct
EVQLVESGGGLVQPGGSLRLSCAASGRTFGDYIMGWFRQAPGKEREMVAAINWIAGYTADADSVRRLFTITADNNKNTAHLMMNLLKPENTAVYYCAEPSPNTGWHFDHWGQGTLVTVSS

SEQ ID NO: 2468 - protein, 114 aa, synthetic construct
EVQLVESGGGLVQPGGSLRLSCAASGRTFGDDTMGWFRQAPGKEREFVAAINWSGGNTPYADSVKGRFTISADNSKNTAYLQMNSLKPEDTAVYYCATDPPLFWGQGTLVTVSS

SEQ ID NO: 2469 - protein, 114 aa, synthetic construct
EVQLVESGGGLVQPGGSLRLSCAASGRTFSDDTMGWFRQAPGKEREFVAAINWSGDNTHYADSVKGRFTISADNSKNTAYLQMNSLKPEDTAVYYCATDPPLFWGQGTLVTVSS

SEQ ID NO: 2470 - protein, 120 aa, synthetic construct
EVQLVESGGGLVQPGGSLRLSCAASGRTFGDYIMGWFRQAPGKEREIVAAINWSAGYTAYADSVKGRFTISADNSKNTAYLQMNSLKPEDTAVYYCATAPPLFCWHFDHWGQGTLVTVSS

SEQ ID NO: 2471 - protein, 120 aa, synthetic construct
EVQLVESGGGLVQPGGSLRLSCAASGFTFGDYVMGWFRQAPGKEREIVAAINWNAGYTAYADSVRGLFTITADNSKNTAYLQMNSLKPEDTAVYYCAKASPNTGWHFDHWGQGTLVTVSS

SEQ ID NO: 2472 - protein, 114 aa, synthetic construct
EVQLVESGGGLVQPGGSLRLSCAASGRTFGDYTMGWFRQAPGKEREFVAAINWTGGYTYYADSVKGRFTISADNSKNTAYLQMNSLKPEDTAVYYCATDPPLFWGQGTLVTVSS

SEQ ID NO: 2473 - protein, 120 aa, synthetic construct
EVQLVESGGGLVQPGGSLRLSCAASGRTFGDYIMGWFRQAPGKEREIVAAINWSAGYTAYADSVKGLFTITADNSKNTAYLQMNILKPEDTAVYYCARATPNTGWHFDHWGQGTLVTVSS

SEQ ID NO: 2474 - protein, 114 aa, synthetic construct
EVQLVESGGGLVQPGGSLRLSCAASGRTFGDYIMGWFRQAPGKEREFVAAINWSGDNTHYADSVKGRFTISADNSKNTAYLQMNSLKPEDTAVYYCATDPPLFWGQGTLVTVSS

SEQ ID NO: 2475 - protein, 120 aa, synthetic construct
EVQLVESGGGLVQPGGSLRLSCAASGRTFGDYIMGWFRQAPGKEREIVAAINWSAGYTPYADSVKGRFTISADNSKNTAYLQMNSLKPEDTAVYYCATDPPLFCCHFDHWGQGTLVTVSS

SEQ ID NO: 2476 - protein, 120 aa, synthetic construct
EVQLVESGGGLVQPGGSLRLSCAASGRTFGDYIMGWFRQAPGKERESVAAINWSAGYTAYADSVKGRFTISADNSKNTAYLQMNSLKPEDTAVYYCATAPPNTGWHFDHWGQGTLVTVSS

SEQ ID NO: 2477 - protein, 123 aa, synthetic construct
EVQLVESGGGLVQPGGSLRLSCAASGFTWGDYTMGWFRQAPGKEREFVAAINWSGGNTYYADSVKGRFTISADNSKNTAYLQMNSLKPEDTAVYYCAADRRGLASTRAADYDWGQGTLVTVSS

SEQ ID NO: 2478 - protein, 122 aa, synthetic construct
EVQLVESGGGLVQPGGSLRLSCAASGIPSTLRAMGWFRQAPGKEREFVAAVSSLGPFTRYADSVKGRFTISADNSKNTAYLQMNSLKPEDTAVYYCAAKPGWVARDPSQYNWGQGTLVTVSS

SEQ ID NO: 2479 - protein, 124 aa, synthetic construct
EVQLVESGGGLVQPGGSLRLSCAASGFSFDDDYVMGWFRQAPGKEREFVAAINWSGGSTYYADSVKGRFTISADNSKNTAYLQMNSLKPEDTAVYYCAADRRGLASTRAADYDWGQGTLVTVSS

SEQ ID NO: 2480 - protein, 116 aa, synthetic construct
EVQLVESGGGLVQPGGSLRLSCAASGRTFSNAAMGWFRQAPGKEREFVARILWTGASRSYADSVKGRFTISADNSKNTAYLQMNSLKPEDTAVYYCATTENPNPRWGQGTLVTVSS

SEQ ID NO: 2481 - protein, 120 aa, synthetic construct
EVQLVESGGGLVQPGGSLRLSCAASGGTFGVYHMGWFRQAPGKEREGVAAINMSGDDSAYADSVKGRFTISADNSKNTAYLQMNSLKPEDTAVYYCAILVGPGQVEFDHWGQGTLVTVSS

SEQ ID NO: 2482 - protein, 124 aa, synthetic construct
EVQLVESGGGLVQPGGSLRLSCAASGFTFSSYYMGWFRQAPGKEREFVARISGSTFYADSVKGRFTISADNSKNTAYLQMNSLKPEDTAVYYCAALPFVCPSGSYSDYGDEYDWGQGTLVTVSS

SEQ ID NO: 2483 - protein, 114 aa, synthetic construct
EVQLVESGGGLVQPGGSLRLSCAASGRTFSGDFMGWFRQAPGKEREFVGRINWSGGNTYYADSVRGLFTITADNNKNTAYLMMNLLKPEDTAVYYCPTDPPLFWGLGTLVTWSS

SEQ ID NO: 2484 - protein, 119 aa, synthetic construct
EVQLVESGGGLVQPGGSLRLSCAASGSTLRDYAMGWFRQAPGKERESVAAITWSGGSTAYADSVKGRFTISADNSKNTAYLQMNSLKPEDTAVYYCASLLAGDRYFDYWGQGTLVTVSS

SEQ ID NO: 2485 - protein, 123 aa, synthetic construct
EVQLVESGGGLVQPGGSLRLSCAASGFTFDDYTMGWFRQAPGKEREFVAAITDNGGSKYYADSVKGRFTISADNSKNTAYLQMNSLKPEDTAVYYCAADRRGLASTRAADYDWGQGTLVTVSS

SEQ ID NO: 2486 - protein, 122 aa, synthetic construct
EVQLVESGGGLVQPGGSLRLSCAASGGTFSSYGMGWFRQAPGKEREFVAAINWSGASTYYADSVKGRFTISADNSKNTAYLQMNSLKPEDTAVYYCARDWRDRTWGNSLDYWGQGTLVTVSS

SEQ ID NO: 2487 - protein, 124 aa, synthetic construct
EVQLVESGGGLVQPGGSLRLSCAASGFSFDDDYVMGWFRQAPGKEREFVAAISWSEDNTYYADSVKGRFTISADNSKNTAYLQMNSLKPEDTAVYYCAADRRGLASTRAADYDWGQGTLVTVSS

SEQ ID NO: 2488 - protein, 124 aa, synthetic construct
EVQLVESGGGLVQPGGSLRLSCAASGFSFDDDYVMGWFRQAPGKEREFVAAVSGSGDDTYYADSVKGRFTISADNSKNTAYLQMNSLKPEDTAVYYCAADRRGLASTRAADYDWGQGTLVTVSS

SEQ ID NO: 2489 - protein, 126 aa, synthetic construct
EVQLVESGGGLVQPGGSLRLSCAASGNIAAINVMGWFRQAPGKEREFVAAISASGRRTDYADSVKGRFTISADNSKNTAYLQMNSLKPEDTAVYYCARRVYYYDSSGPPGVTFDIWGQGTLVTVSS

SEQ ID NO: 2490 - protein, 118 aa, synthetic construct
EVQLVESGGGLVQPGGSLRLSCAASGIITSRYVMGWFRQAPGKEREGVAAISTGGSTIYADSVKGRFTISADNSKNTAYLQMNSLKPEDTAVYYCARQDSSSPYFDYWGQGTLVTVSS

SEQ ID NO: 2491 - protein, 124 aa, synthetic construct
EVQLVESGGGLVQPGGSLRLSCAASGFSFDDDYVMGWFRQAPGKEREFVAAISNSGLSTYYADSVKGRFTISADNSKNTAYLQMNSLKPEDTAVYYCAADRRGLASTRAADYDWGQGTLVTVSS

SEQ ID NO: 2492 - protein, 126 aa, synthetic construct
EVQLVESGGGLVQPGGSLRLSCAASGSISSINVMGWFRQAPGKEREFVATMRWSTGSTYYADSVKGRFTISADNSKNTAYLQMNSLKPEDTAVYYCAQRVRGFFGPLRTTPSWYEWGQGTLVTVSS

SEQ ID NO: 2493 - protein, 127 aa, synthetic construct
EVQLVESGGGLVQPGGSLRLSCAASGLTFILYRMGWFRQAPGKEREFVAAINNFGTTKYADSVKGRFTISADNSKNTAYLQMNSLKPEDTAVYYCARTHYDFWSGYTSRTPNYFDYWGQGTLVTVSS

SEQ ID NO: 2494 - protein, 120 aa, synthetic construct
EVQLVESGGGLVQPGGSLRLSCAASGGTFSVYHMGWFRQAPGKEREPVAAISWSGGSTAYADSVKGRFTISADNSKNTAYLQMNSLKPEDTAVYYCAAVNTWTSPSFDSWGQGTLVTVSS

SEQ ID NO: 2495 - protein, 120 aa, synthetic construct
EVQLVESGGGLVQPGGSLRLSCAASGRAFSTYGMGWFRQAPGKEREFVAGINWSGDTPYYADSVKGRFTISADNSKNTAYLQMNSLKPEDTAVYYCAREVGPPPGYFDLWGQGTLVTVSS

SEQ ID NO: 2496 - protein, 123 aa, synthetic construct
EVQLVESGGGLVQPGGSLRLSCAASGRTFSDIAMGWFRQAPGKEREFVASINWGGGNTYYADSVKGRFTISADNSKNTAYLQMNSLKPEDTAVYYCAAKGIWDYLGRRDFGDWGQGTLVTVSS

SEQ ID NO: 2497 - protein, 116 aa, synthetic construct
EVQLVESGGGLVQPGGSLRLSCAASGRTFSSARMGWFRQAPGKEREFVAAISWSGDNTHYADSVKGRFTISADNSKNTAYLQMNSLKPEDTAVYYCATTENPNPRWGQGTLVTVSS

SEQ ID NO: 2498 - protein, 115 aa, synthetic construct
EVQLVESGGGLVQPGGSLRLSCAASGFAFSSYAMGWFRQAPGKEREWVATINGDDYTYYADSVKGRFTISADNSKNTAYLQMNSLKPEDTAVYYCVATPGGYGLWGQGTLVTVSS

SEQ ID NO: 2499 - protein, 125 aa, synthetic construct
EVQLVESGGGLVQPGGSLRLSCAASGITFRRHDMGWFRQAPGKEREFVAAIRWSSSSTVYADSVKGRFTISADNSKNTAYLQMNSLKPEDTAVYYCAADRGVYGGRWYRTSQYTWGQGTLVTVSS

SEQ ID NO: 2500 - protein, 119 aa, synthetic construct
EVQLVESGGGLVQPGGSLRLSCAASGTAASFNPMGWFRQAPGKEREFVAAITSGGSTNYADSVKGRFTISADNSKNTAYLQMNSLKPEDTAVYYCAAIAYEEGVYRWDWGQGTLVTVSS

SEQ ID NO: 2501 - protein, 119 aa, synthetic construct
EVQLVESGGGLVQPGGSLRLSCAASGNINIINYMGWFRQAPGKEREGVAAIHWNGDSTAYADSVKGRFTISADNSKNTAYLQMNSLKPEDTAVYYCASGPPYSNYFAYWGQGTLVTVSS

SEQ ID NO: 2502 - protein, 120 aa, synthetic construct
EVQLVESGGGLVQPGGSLRLSCAASGFTFDDYAMGWFRQAPGKERESVAAISGSGGSTAYADSVKGRFTISADNSKNTAYLQMNSLKPEDTAVYYCAKIMGSGRPYFDHWGQGTLVTVSS

SEQ ID NO: 2503 - protein, 119 aa, synthetic construct
EVQLVESGGGLVQPGGSLRLSCAASGNIFTRNVMGWFRQAPGKEREFVAAITSSGSTNYADSVKGRFTISADNSKNTAYLQMNSLKPEDTAVYYCARPSSDLQGGVDYWGQGTLVTVSS

SEQ ID NO: 2504 - protein, 123 aa, synthetic construct
EVQLVESGGGLVQPGGSLRLSCAASGRTFSSIAMGWFRQAPGKEREFVASINWGGGNTIYADSVKGRFTISADNSKNTAYLQMNSLKPEDTAVYYCAAKGIWDYLGRRDFGDWGQGTLVTVSS

SEQ ID NO: 2505 - protein, 122 aa, synthetic construct
EVQLVESGGGLVQPGGSLRLSCAASGIPSTLRAMGWFRQAPGKEREFVAAVSSLGPFTRYADSVKGRFTISADNSKNTAYLQMNSLKPEDTAVYYCAAKPGWVARDPSEYNWGQGTLVTVSS

SEQ ID NO: 2506 - protein, 118 aa, synthetic construct
EVQLVESGGGLVQPGGSLRLSCAASGFTLDDSAMGWFRQAPGKEREWVAAITNGGSTYYADSVKGRFTISADNSKNTAYLQMNSLKPEDTAVYYCARFARGSPYFDFWGQGTLVTVSS

SEQ ID NO: 2507 - protein, 120 aa, synthetic construct
EVQLVESGGGLVQPGGSLRLSCAASGSISSFNAMGWFRQAPGKERESVAAIDWDGSTAYADSVKGRFTISADNSKNTAYLQMNSLKPEDTAVYYCARGGGYYGSGSFEYWGQGTLVTVSS

SEQ ID NO: 2508 - protein, 122 aa, synthetic construct
EVQLVESGGGLVQPGGSLRLSCAASGNIFSDNIIGWFRQAPGKEREMVAYYTSGGSIDYADSVKGRFTISADNSKNTAYLQMNSLKPEDTAVYYCARGTAVGRPPPGGMDVWGQGTLVTVSS

SEQ ID NO: 2509 - protein, 119 aa, synthetic construct
EVQLVESGGGLVQPGGSLRLSCAASGSISSIGAMGWFRQAPGKEREGVAAISSSGSSTVYADSVKGRFTISADNSKNTAYLQMNSLKPEDTAVYYCARVPPGQAYFDSWGQGTLVTVSS

SEQ ID NO: 2510 - protein, 123 aa, synthetic construct
EVQLVESGGGLVQPGGSLRLSCAASGFTFDDYGMGWFRQAPGKERELVATITWSGDSTYYADSVKGRFTISADNSKNTAYLQMNSLKPEDTAVYYCAKGGSWYYDSSGYYGRWGQGTLVTVSS

SEQ ID NO: 2511 - protein, 118 aa, synthetic construct
EVQLVESGGGLVQPGGSLRLSCAASGRTFSNYTMGWFRQAPGKEREWVSAISWSTGSTYYADSVKGRFTISADNSKNTAYLQMNSLKPEDTAVYYCAADRYGPPWYDWGQGTLVTVSS

SEQ ID NO: 2512 - protein, 116 aa, synthetic construct
EVQLVESGGGLVQPGGSLRLSCAASGSTNYMGWFRQAPGKEREGVAAISMSGDDTIYADSVKGRFTISADNSKNTAYLQMNSLKPEDTAVYYCARIGLRGRYFDLWGQGTLVTVSS

SEQ ID NO: 2513 - protein, 118 aa, synthetic construct
EVQLVESGGGLVQPGGSLRLSCAASGGTFSSVGMGWFRQAPGKERELVAVINWSGARTYYADSVKGRFTISADNSKNTAYLQMNSLKPEDTAVYYCAVPWMDYNRRDWGQGTLVTVSS

SEQ ID NO: 2514 - protein, 118 aa, synthetic construct
EVQLVESGGGLVQPGGSLRLSCAASGRIFTNTAMGWFRQAPGKEREGVAAINWSGGSTAYADSVKGRFTISADNSKNTAYLQMNSLKPEDTAVYYCARTSGSYSFDYWGQGTLVTVSS

SEQ ID NO: 2515 - protein, 123 aa, synthetic construct
EVQLVESGGGLVQPGGSLRLSCAASGEEFSDHWMGWFRQAPGKEREFVGAIHWSGGRTYYADSVKGRFTISADNSKNTAYLQMNSLKPEDTAVYYCAADRRGLASTRAADYDWGQGTLVTVSS

SEQ ID NO: 2516 - protein, 123 aa, synthetic construct
EVQLVESGGGLVQPGGSLRLSCAASGRTFSSIAMGWFRQAPGKEREFVAAINWSGARTAYADSVKGRFTISADNSKNTAYLQMNSLKPEDTAVYYCAAKGIWDYLGRRDFGDWGQGTLVTVSS

SEQ ID NO: 2517 - protein, 119 aa, synthetic construct
EVQLVESGGGLVQPGGSLRLSCAASGSTSSLRTMGWFRQAPGKEREGVAAISSRDGSTIYADSVKGRFTISADNSKNTAYLQMNSLKPEDTAVYYCARDDSSSPYFDYWGQGTLVTVSS

SEQ ID NO: 2518 - protein, 121 aa, synthetic construct
EVQLVESGGGLVQPGGSLRLSCAASGGGTFGSYAMGWFRQAPGKEREFVAAISIASGASGGTTNYADSVKGRFTISADNSKNTAYLQMNSLKPEDTAVYYCATTMNPNPRWGQGTLVTVSS

SEQ ID NO: 2519 - protein, 116 aa, synthetic construct
EVQLVESGGGLVQPGGSLRLSCAASGRTFSNAAMGWFRQAPGKEREFVARITWNGGSTFYADSVKGRFTISADNSKNTAYLQMNSLKPEDTAVYYCATTENPNPRWGQGTLVTVSS

SEQ ID NO: 2520 - protein, 123 aa, synthetic construct
EVQLVESGGGLVQPGGSLRLSCAASGIILSDNAMGWFRQAPGKEREFVAAISWLGESTYYADSVKGRFTISADNSKNTAYLQMNSLKPEDTAVYYCAADRRGLASTRAADYDWGQGTLVTVSS

SEQ ID NO: 2521 - protein, 120 aa, synthetic construct
EVQLVESGGGLVQPGGSLRLSCAASGRTFGDYIMGWFRQAPGKERESVAAINWNGGYTAYADSVKGRFTISADNSKNTAYLQMNSLKPEDTAVYYCATTSPNTGWHYYRWGQGTLVTVSS

SEQ ID NO: 2522 - protein, 128 aa, synthetic construct
EVQLVESGGGLVQPGGSLRLSCAASGFNFNWYPMGWFRQAPGKERESVAAISWTGVSTYTAYADSVKGRFTISADNSKNTAYLQMNSLKPEDTAVYYCARWGPGPAGGSPGLVGFDYWGQGTLVTVSS

SEQ ID NO: 2523 - protein, 116 aa, synthetic construct
EVQLVESGGGLVQPGGSLRLSCAASGSIRSVSVMGWFRQAPGKEREAVAAISWSGVGTAYADSVKGRFTISADNSKNTAYLQMNSLKPEDTAVYYCAAYQRGWGDWGQGTLVTVSS

SEQ ID NO: 2524 - protein, 122 aa, synthetic construct
EVQLVESGGGLVQPGGSLRLSCAASGMTFRLYAMGWFRQAPGKEREFVGAINWLSESTYYADSVKGRFTISADNSKNTAYLQMNSLKPEDTAVYYCAAKPGWVARDPSEYNWGQGTLVTVSS

SEQ ID NO: 2525 - protein, 114 aa, synthetic construct
EVQLVESGGGLVQPGGSLRLSCAASGRTFSDDAMGWFRQAPGKEREFVAAINWSGGSTYYADSVKGRFTISADNSKNTAYLQMNSLKPEDTAVYYCATDPPLFWGQGTMVTVSS

SEQ ID NO: 2526 - protein, 125 aa, synthetic construct
EVQLVESGGGLVQPGGSLRLSCAASGGTFSVYAMGWFRQAPGKEREGVAAISMSGDDAAYADSVKGRFTISADNSKNTAYLQMNSLKPEDTAVYYCAKISKDDGGKPRGAFFDSWGQGTLVTVSS

SEQ ID NO: 2527 - protein, 120 aa, synthetic construct
EVQLVESGGGLVQPGGSLRLSCAASGFALGYYAMGWFRQAPGKERESVAAISSRDGSTAYADSVKGRFTISADNSKNTAYLQMNSLKPEDTAVYYCARLATGPQAYFHHWGQGTLVTVSS

SEQ ID NO: 2528 - protein, 119 aa, synthetic construct
EVQLVESGGGLVQPGGSLRLSCAASGFNLDDYAMGWFRQAPGKERESVAAISWDGGATAYADSVKGRFTISADNSKNTAYLQMNSLKPEDTAVYYCARVGRGTTAFDSWGQGTLVTVSS

SEQ ID NO: 2529 - protein, 125 aa, synthetic construct
EVQLVESGGGLVQPGGSLRLSCAASGNTFSGGFMGWFRQAPGKEREFVASIRSGARTYYADSVKGRFTISADNSKNTAYLQMNSLKPEDTAVYYCAQRVRGFFGPLRTTPSWYEWGQGTLVTVSS

SEQ ID NO: 2530 - protein, 119 aa, synthetic construct
EVQLVESGGGLVQPGGSLRLSCAASGSIRSINIMGWFRQAPGKEREAVAAISWSGGSTVYADSVKGRFTISADNSKNTAYLQMNSLKPEDTAVYYCASLLAGDRYFDYWGQGTLVTVSS

SEQ ID NO: 2531 - protein, 117 aa, synthetic construct; identical to SEQ ID NO: 2287

SEQ ID NO: 2532 - protein, 121 aa, synthetic construct
EVQLVESGGGLVQPGGSLRLSCAASGLRFDDYAMGWFRQAPGKERELVAIKFSGGTTDYADSVKGRFTISADNSKNTAYLQMNSLKPEDTAVYYCASWDGLIGLDAYEYDWGQGTLVTVSS

SEQ ID NO: 2533 - protein, 117 aa, synthetic construct
EVQLVESGGGLVQPGGSLRLSCAASGSIFSIDVMGWFRQAPGKEREFVAGISWSGDSTLYADSVKGRFTISADNSKNTAYLQMNSLKPEDTAVYYCAAFDGYTGSDWGQGTLVTVSS

SEQ ID NO: 2534 - protein, 117 aa, synthetic construct
EVQLVESGGGLVQPGGSLRLSCAASGFTLADYAMGWFRQAPGKEREFVAVITCSGGSTDYADSVKGRFTISADNSKNTAYLQMNSLKPEDTAVYYCAADDCYIGCGWGQGTLVTVSS

SEQ ID NO: 2535 - protein, 131 aa, synthetic construct
EVQLVESGGGLVQPGGSLRLSCAASGRTFSSIAMGWFRQAPGKERELVAEITEGGISPSGDNIYYADSVKGRFTISADNSKNTAYLQMNSLKPEDTAVYYCAAELHSSDYTSPGAESDYGWGQGTLVTVSS

SEQ ID NO: 2536 - protein, 126 aa, synthetic construct
EVQLVESGGGLVQPGGSLRLSCAASGPTFSSYAMMGWFRQAPGKEREWVAAINNFGTTKYADSVKGRFTISADNSKNTAYLQMNSLKPEDTAVYYCAASASDYGLGLELFHDEYNWGQGTLVTVSS

SEQ ID NO: 2537 - protein, 111 aa, synthetic construct
EVQLVESGGGLVQPGGSLRLSCAASGSTGYMGWFRQAPGKEREFVAAIHSGGSTNYADSVKGRFTISADNSKNTAYLQMNSLKPEDTAVYYCATVATALIWGQGTLVTVSS

SEQ ID NO: 2538 - protein, 123 aa, synthetic construct; identical to SEQ ID NO: 2316

SEQ ID NO: 2539 - protein, 115 aa, synthetic construct
EVQLVESGGGLVQPGGSLRLSCAASGLTLSTYGMGWFRQAPGKEREFVAHIPRSTYSPYYADSVKGRFTISADNSKNTAYLQMNSLKPEDTAVYYCAAIGDGAVWGQGTLVTVSS

SEQ ID NO: 2540 - protein, 117 aa, synthetic construct
EVQLVESGGGLVQPGGSLRLSCAASGFTFNNHNMGWFRQAPGKEREFVAAISSYSHTAYADSVKGRFTISADNSKNTAYLQMNSLKPEDTAVYYCALQPFGASNYRWGQGTLVTVSS

SEQ ID NO: 2541 - protein, 112 aa, synthetic construct
EVQLVESGGGLVQPGGSLRLSCAASGGIYRVMGWFRQAPGKERELVASISSGGGINYADSVKGRFTISADNSKNTAYLQMNSLKPEDTAVYYCAAESWGRQWGQGTLVTVSS

SEQ ID NO: 2542 - protein, 115 aa, synthetic construct
EVQLVESGGGLVQPGGSLRLSCAASGYTDSNLWMGWFRQAPGKEREFVAINRSTGSTSYADSVKGRFTISADNSKNTAYLQMNSLKPEDTAVYYCATSGSGSPNWGQGTLVTVSS

SEQ ID NO: 2543 - protein, 116 aa, synthetic construct
EVQLVESGGGLVQPGGSLRLSCAASGFTFDYYTMGWFRQAPGKEREFVAAIRSSGGLFYADSVKGRFTISADNSKNTAYLQMNSLKPEDTAVYYCAAYLDGYSGSWGQGTLVTVSS

SEQ ID NO: 2544 - protein, 117 aa, synthetic construct
EVQLVESGGGLVQPGGSLRLSCAASGGIFSINVMGWFRQAPGKEREWVSAIRWNGGNTAYADSVKGRFTITADNSKNTAYLQMNSLKPEDTAVYYCAGFDGYTGSDWGQGTLVTVSS

SEQ ID NO: 2545 - protein, 116 aa, synthetic construct
EVQLVESGGGLVQPGGSLRLSCAASGFTFDGAAMGWFRQAPGKEREFVATIRWTNSTDYADSVKGRFTISADNSKNTAYLQMNSLKPEDTAVYYCARGRYGIVERWGQGTLVTVSS

SEQ ID NO: 2546 - protein, 117 aa, synthetic construct
EVQLVESGGGLVQPGGSLRLSCAASGRTHSIYPMGWFRQAPGKERELVAAIHSGGATVYADSVKGRFTISADNSKNTAYLQMNSLKPEDTAVYYCAARRWIPPGPIWGQGTLVTVSS

SEQ ID NO: 2547 - protein, 115 aa, synthetic construct
EVQLVESGGGLVQPGGSLRLSCAASGPTFSIYAMGWFRQAPGKEREFVAGIRWSDVYTQYADSVKGRFTISADNSKNTAYLQMNSLKPEDTAVYYCALDIDYRDWGQGTLVTVSS

SEQ ID NO: 2548 - protein, 132 aa, synthetic construct
EVQLVESGGGLVQPGGSLRLSCAASGLTFDDNIHVMGWFPQAPGKEREFVAAIHWSGGSTIYADSVKGRFTINADNSKNTAYLQMNSLKPEDTAVYYCAADVYPQDYGLGYVEGKMYYGMDWGQGTLVTVSS

SEQ ID NO: 2549 - protein, 116 aa, synthetic construct
EVQLVESGGGLVQPGGSLRLSCAASGLTLDYYAMGWFRQAPGKEREWVASINWSGGSTYYADSVKGRFTISADNSKNTAYLQMNSLKPEDTAVYYCAAYGSGEFDWGQGTLVTVSS

SEQ ID NO: 2550 - protein, 114 aa, synthetic construct
EVQLVESGGGLVQPGGSLRLSCAASGRTIVPYTMGWFRQAPGKERELVAAISPSAFTEYADSVKGRFTISADNSKNTAYLQMNSLKPEDTAVYYCAARRWGYDWGQGTLVTVSS

SEQ ID NO: 2551 - protein, 123 aa, synthetic construct
EVQLVESGGGLVQPGGSLRLSCAASGGTFTTYHMGWFRQAPGKEREFVAHISTGGATNYADSVKGRFTISADNSKNTAYLQMNSLKPEDTAVYYCATFPAIVTDSDYDLGNDWGQGTLVTVSS

SEQ ID NO: 2552 - protein, 124 aa, synthetic construct
EVQLVESGGGLVQPGGSLRLSCAASGFTFNVFAMGWFRQAPGKEREFVAAINWSDSRTDYADSVKGRFTISADNSKNTAYLQMNSLKPEDTAVYYCASGSDNRARELSRYEYVWGQGTLVTVSS

SEQ ID NO: 2553 - protein, 117 aa, synthetic construct
EVQLVESGGGLVQPGGSLRLSCAASGSIFSIDVMGWFRQAPGKEREFVAAISWSGESTLYADSVKGRFTISADNSKNTAYLQMNSLKPEDTAVYYCAAFDGYSGSDWGQGTLVTVSS

SEQ ID NO: 2554 - protein, 117 aa, synthetic construct
EVQLVESGGGLVQPGGSLRLSCAASGFTFSSYSMGWFRQAPGKEREFVAAISSYSHTAYADSVKGRFTIIADNSKNTAYLQMNSLKPEDTAVYYCALQPFGASSYRWGQGTLVTVSS

SEQ ID NO: 2555 - protein, 117 aa, synthetic construct
EVQLVESGGGLVQPGGSLRLSCAASGNTFSINVMGWFRQAPGKEREFVAAIHWSGDSTLYADSGKGRFTIIADNNKNTAYLQMISLKPEDTAVYYCAAFDGYSGNHWGQGTLVTVSS

SEQ ID NO: 2556 - protein, 123 aa, synthetic construct
EVQLVESGGGLVQPGGSLRLSCAASGRTISSYIMGWFRQAPGKERELVARIYTGGDTIYADSVKGRFTISADNSKNTAYLQMNSLKPEDTAVYYCAARTSYNGRYDYIDDYSWGQGTLVTVSS

SEQ ID NO: 2557 - protein, 122 aa, synthetic construct
EVQLVESGGGLVQPGGSLRLSCAASGRANSINWMGWFRQAPGKEREFVATITPGGNTNYADSVKGRFTISADNSKNTAYLQMNSLKPEDTAVYYCAAAAGSTWYGTLYEYDWGQGTLVTVSS

SEQ ID NO: 2558 - protein, 113 aa, synthetic construct
EVQLVESGGGLVQPGGSLRLSCAASGGTFSVFAMGWFRQVPGKERELVAEITAGGSTYYADSVKGRFTISADNSKNTAYLQMNSLKPEDTAVYYCAVDGPFGWGQGTLVTVSS

SEQ ID NO: 2559 - protein, 115 aa, synthetic construct
EVQLVESGGGLVQPGGSLRLSCAASGFTFDDYPMGWFRQAPGKEREGVASVLRGGYTWYADSVKGRFTISADNSKNTAYLQMNSLKPEDTAVYYCAKDWATGLAWGQGTLVTVSS

SEQ ID NO: 2560 - protein, 120 aa, synthetic construct
EVQLVESGGGLVQPGGSLRLSCAASGFALGYYAMGWFRQAPGKEREFVAGIRWTDAYTEYADSVKGRFTISADNSKNTAYLQMNSLKPEDTAVYYCAADVSPSYGSRWYWGQGTLVTVSS

SEQ ID NO: 2561 - protein, 117 aa, synthetic construct
EVQLVESGGGLVQPGGSLRLSCAASGRTLDIHVMGWFRQAPGKEREFVAVINWTGESTLYADSVKGRFTISADNSKNTAYLQMNSLKPEDTAVYYCAAFDGYTGNYWGQGTLVTVSS

SEQ ID NO: 2562 - protein, 118 aa, synthetic construct
EVQLVESGGGLVQPGGSLRLSCAASGFTPDNYAMGWFRQAPGKEREFVAALGWSGVTTYHYYADSVKGRFTISADNSKNTAYLQMNSLKPEDTAVYYCASDESDAANWGQGTLVTVSS

SEQ ID NO: 2563 - protein, 114 aa, synthetic construct
EVQLVESGGGLVQPGGSLRLSCAASGFTFDDYAMGWFRQAPGKERELVATIMWSGNTTYYADSVRRRFIIRDNNNKNTAHLQMNSLKPEDTAVYYCATNDDDVWGQGTLVTVSS

SEQ ID NO: 2564 - protein, 124 aa, synthetic construct
EVQLVESGGGLVQPGGSLRLSCAASGRTFSRYIMGWFRQAPGKEREFVAAISWSGGDNTYYADSVKGRFTISADNSKNTAYLQMNSLKPEDTAVYYCAAYRIVVGGTSPGDWRWGQGTLVTVSS

SEQ ID NO: 2565 - protein, 117 aa, synthetic construct
EVQLVESGGGLVQPGGSLRLSCAASGPTFSIYAMGWFRQAPGKERELVAGISWNGGSTNYADSVKGRFTISADNSKNTAYLQMNSLKPEDTAVYYCALRRRFGGQEWGQGTLVTVSS

SEQ ID NO: 2566 - protein, 116 aa, synthetic construct
EVQLVESGGGLVQPGGSLRLSCAASGRTFSLNAMGWFRQAPGKERELVAAISCGGGSTYADNGKGRFTIITDNSKNTAYLQMMNLKPEDTAAYYCAADNDMGYCSWGQGTLVTVSS

SEQ ID NO: 2567 - protein, 123 aa, synthetic construct
EVQLVESGGGLVQPGGSLRLSCAASGSTFSINAMGWFRQAPGKEREFVGGISRSGATTNYADSVKGRFTISADNSKNTAYLQMNSLKPEDTAVYYCAADGVPEYSDYASGPVWGQGTLVTVSS

SEQ ID NO: 2568 - protein, 120 aa, synthetic construct
EVQLVESGGGLVQPGGSLRLSCAASGRTFSMHAMGWFRQAPGKERELVASISSQGRTNYADSVKGRFTISADNSKNTAYLQMNSLKPEDTAVYYCAAEVRNGSDYLPIDWGQGTLVTVSS

SEQ ID NO: 2569 - protein, 115 aa, synthetic construct
EVQLVESGGGLVQPGGSLRLSCAASGVTLDLYAMGWFRQAPGKEREFVAGIRWTDAYTEYADSVKGRFTISADNSKNTAYLQMNSLKPEDTAVYYCAVDIDYRDWGQGTLVTVSS

SEQ ID NO: 2570 - protein, 117 aa, synthetic construct
EVQLVESGGGLVQPGGSLRLSCAASGLPFTINVMGWFRQAPGKEREFVAAIHWSGLTTFYADSVKGLFTITEDNSKNTAHLMMNLLKPEDTAVYCCAELDGYFFAHWGQGTLVTVSS

SEQ ID NO: 2571 - protein, 123 aa, synthetic construct
EVQLVESGGGLVQPGGSLRLSCAASGRAFSNYAMGWFRQAPGKEREFVAWINNRGTTDYADSGSTYYADSVKGRFTISADNSKNTAYLQMNSLKPEDTAVYYCASTDDYGVDWGQGTLVTVSS

SEQ ID NO: 2572 - protein, 120 aa, synthetic construct
EVQLVESGGGLVQPGGSLRLSCAASGFTPDDYAMGWFRQAPGKEREFVASIGYSGRSNSYNYYADSVKGRFTISADNSKNTAYLQMNSLKPEDTAVYYCAIAHGSSTYNWGQGTLVTVSS

SEQ ID NO: 2573 - protein, 117 aa, synthetic construct
EVQLVESGGGLVQPGGSLRLSCAASGFTLNYYGMGWFPQAPGKEREFVAAITSGGAPHYADSVKGRFTINADNSKNTAYLQMNSLKPEDTAVYYCASAYDRGIGYDWGQGTLVTVSS

SEQ ID NO: 2574 - protein, 122 aa, synthetic construct; identical to SEQ ID NO: 2289

SEQ ID NO: 2575 - protein, 117 aa, synthetic construct
EVQLVESGGGLVQPGGSLRLSCAASGRTFSINAMGWFPQAPGKERELVAAISWSGESTQYADSVKGRFTISADNSKNTAYLQMNSLKPEDTAVYYCAAFDGGSGTQWGQGTLVTVSS

SEQ ID NO: 2576 - protein, 117 aa, synthetic construct
EVQLVESGGGLVQPGGSLRLSCAASGEEFSDHWMGWFRQAPGKEREFVAAIHWSGDSTHRNYADSVKGRFTISADNSKNTAYLQMNSLKPEDTAVYYCATVGITLNWGQGTLVTVSS

SEQ ID NO: 2577 - protein, 118 aa, synthetic construct; identical to SEQ ID NO: 2285

SEQ ID NO: 2578 - protein, 115 aa, synthetic construct
EVQLVESGGGLVQPGGSLRLSCAASGLPLDLYAMGWFPPAPGKELEFVAGIRWSDAYTEYADSVKGRFTINADNSKNPANLQMNSLKPEDTAVYYCALDIDYRHWGQGTLVTVSS

SEQ ID NO: 2579 - protein, 121 aa, synthetic construct
EVQLVESGGGLVQPGGSLRLSCAASGRTSTVNGMGWFRQAPGKEREFVASISQSGAATAYADSVKGRFTISADNSKNTAYLQMNSLKPEDTAVYYCAADRTYSYSSTGYYWGQGTLVTVSS

SEQ ID NO: 2580 - protein, 117 aa, synthetic construct; identical to SEQ ID NO: 2295

SEQ ID NO: 2581 - protein, 122 aa, synthetic construct
EVQLVESGGGLVQPGGSLRLSCAASGRPNSINWMGWFRQAPGKERQFVATITPGGNTNYADSVKGRFTISADNSKNTAYLLMNSLKPEDTAVYYCAAAAGTTWYGTLYEYDWGQGTLVTVSS

SEQ ID NO: 2582 - protein, 122 aa, synthetic construct
EVQLVESGGGLVQPGGSLRLSCAASGEKFSDHWMGWFRQAPGKEREFVATITFSGARTAYADSVKGRFTISADNSKNTAYLQMNSLKPEDTAVYYCAALIKPSSTDRIFEEWGQGTLVTVSS

SEQ ID NO: 2583 - protein, 115 aa, synthetic construct
EVQLVESGGGLVQPGGSLRLSCAASGLTVVPYAMGWFRQAPGKEREFVAAIRRSAVTNYADSVKGRFTIIADNSKNTAYLLMNSLKPEDTAVYYCAARRWGYHYWGQGTLVTVSS

SEQ ID NO: 2584 - protein, 117 aa, synthetic construct
EVQLVESGGGLVQPGGSLRLSCAASGTTFNFNVMGWFRQAPGKERELVAVISWTGESTLYADSVKGRFTISADNSKNTAYLQMNSLKPEDTAVYYCAAFDGYTGRDWGQGTLVTVSS

SEQ ID NO: 2585 - protein, 123 aa, synthetic construct
EVQLVESGGGLVQPGGSLRLSCAASGIDVNRNAMGWFRQAPGKEREFVAAITWSGGWRYYADSVKGRFTISADNSKNTAYLQMNSLKPEDTAVYYCATTFGDAGIPDQYDFGWGQGTLVTVSS

SEQ ID NO: 2586 - protein, 111 aa, synthetic construct
EVQLVESGGGLVQPGGSLRLSCAASGRTFSSNMGWFRQAPGKEREFVARIFGGDRTLYADSVKGRFTISADNSKNTAYLQMNSLKPEDTAVYYCADINGDWGQGTLVTVSS

SEQ ID NO: 2587 - protein, 111 aa, synthetic construct
EVQLVESGGGLVQPGGSLRLSCAASGGTFSMGWIRWVPQAQGKELEFMGCIGWITYYADYAKSRFSLFTDNADNTKNPPNMHMNPQKPEDTAVYYCAPFGWGQGTLVTVSS

SEQ ID NO: 2588 - protein, 120 aa, synthetic construct
EVQLVESGGGLVQPGGSLRLSCAASGCTLDYYAMGWFRQAPGKEREFVAGIRWTDAYTEYADSVKGRFTISADNSKNTAYLQMNSLKPEDTAVYYCAADVSPSYGGRWYWGQGTLVTVSS

SEQ ID NO: 2589 - protein, 124 aa, synthetic construct
EVQLVESGGGLVQPGGSLRLSCAASGLTFSLYRMCWFRQAPGKEREEVSCISNIDGSTYYADSVKGRFTISADNSKNTAYLQMNSLKPEDTAVYYCAADLLGDSDYEPSSGFGWGQGTLVTVSS

SEQ ID NO: 2590 - protein, 120 aa, synthetic construct
EVQLVESGGGLVQPGGSLRLSCAASGRSFSSHRMGWFRQAPGKEREFVAAIMWSGSHRNYADSVKGRFTISADNSKNTAYLQMNSLKPEDTAVYYCAAIAYEEGVYRWDWGQGTLVTVSS

SEQ ID NO: 2591 - protein, 114 aa, synthetic construct
EVQLVESGGGLVQPGGSLRLSCAASGRIIVPNTMGWFRQAPGKERERVTGISPSAFTEYADSVKGRFTISADNSKNTAYLQMNSLKPEDTAVYYCAAHGWGCHWGQGTLVTVSS

SEQ ID NO: 2592 - protein, 122 aa, synthetic construct
EVQLVESGGGLVQPGGSLRLSCAASGSIFIISMGWFRQAPGKEHEFVTGINWSGGSTTYADSVKGRFTINADNSKNTAYLQMNSLKPEDTAVYYCAASAIGSGALRRFEYDWGQGTLVTVSS

SEQ ID NO: 2593 - protein, 120 aa, synthetic construct
EVQLVESGGGLVQPGGSLRLSCAASGFSLDYYDMGWFRQAPGKEREFVAALGWSGGSTDYADSVKGRFTISADNSKNTAYLQMNSLKPEDTAVYYCAAGNGGRYGIVERWGQGTLVTVSS

SEQ ID NO: 2594 - protein, 122 aa, synthetic construct
EVQLVESGGGLVQPGGSLRLSCAASGTSISNRVMGWFRQAPGKERELVARIYTGGDTLYADSVKGRFTISADNSKNTAYLQMNSLKPEDTAVYYCAARKIYRSLSYYGDYDWGQGTLVTVSS

SEQ ID NO: 2595 - protein, 119 aa, synthetic construct
EVQLVESGGGLVQPGGSLRLSCAASGNIDRLYAMGWFRQAPGKEREGVAAIDSDGSTDYADSVKGRFTISADNSKNTAYLQMNSLKPEDTAVYYCAALIDYGLGFPIEWGQGTLVTVSS

SEQ ID NO: 2596 - protein, 117 aa, synthetic construct
EVQLVESGGGLVQPGGSLRLSCAASGNTFTINVMGWFRQAPGKEREFVAAINWNGGTTLYADSVKGRFTISADNSKNTAYLQMNSLKPEDTAVYYCAAFDGYSGIDWGQGTLVTVSS

SEQ ID NO: 2597 - protein, 115 aa, synthetic construct
EVQLVESGGGLVQPGGSLRLSCAASGFNVNDYAMGWFRQAPGKEREFVAGITSSVGVTNYADSVKGRFTISADNSKNTAYLQMNSLKPEDTAVYYCAADIFFVNWGRGTLVTVSS

SEQ ID NO: 2598 - protein, 125 aa, synthetic construct
EVQLVESGGGLVQPGGSLRLSCAASGFTFDHYTMGWFRQAPGKEREFVAAISGSENVTSYADSVKGRFTISADNSKNTAYLQMNSLKPEDTAVYYCAAEPYIPVRTMRHMTFLTWGQGTLVTVSS

SEQ ID NO: 2599 - protein, 115 aa, synthetic construct
EVQLVESGGGLVQPGGSLRLSCAASGRTFGNYNMGWFRQAPGKEREFVATINSLGGTSYADSVKGRFTISADNSKNTAYLQMNSLKPEDTAVYYCARVDYYMDVWGQGTLVTVSS

SEQ ID NO: 2600 - protein, 118 aa, synthetic construct
EVQLVESGGGLVQPGGSLRLSCAASGFTMSSSWMGWFRQAPGKEREFVTVISGVGTSYADSVKGRFTISADNSKNTAYLQMNSLKPEDTAVYYCARGPDSSGYGFDYWGQGTLVTVSS

SEQ ID NO: 2601 - protein, 115 aa, synthetic construct
EVQLVESGGGLVQPGGSLRLSCAASGFTFSPSWMGWFRQAPGKEREFVATINEYGGRNYADSVKGRFTISADNSKNTAYLQMNSLKPEDTAVYYCARVDRDFDYWGQGTLVTVSS

SEQ ID NO: 2602 - protein, 121 aa, synthetic construct
EVQLVESGGGLVQPGGSLRLSCAASGFTRDYYTMGWFRQAPGKEREFVAAISRSGSLTSYADSVKGRFTISADNSKNTAYLQMNSLKPEDTAVYYCANLAYYDSSGYYDYWGQGTLVTVSS

SEQ ID NO: 2603 - protein, 112 aa, synthetic construct
EVQLVESGGGLVQPGGSLRLSCAASGRTFTMGWFRQAPGKEREFVASTNSAGSTNYADSVNGRFTISADNSKNTAYLQMNSLKPEDTAVYYCTTVDQYFDYWGQGTLVTVSS

SEQ ID NO: 2604 - protein, 119 aa, synthetic construct
EVQLVESGGGLVQPGGSLRLSCAASGTTLDYYAMGWFRQAPGKERELVAAISWSGGSTAYADSVKGRFTISADNSKNTAYLQMNSLKPEDTAVYYCAREDYYDSSGYSWGQGTLVTVSS

SEQ ID NO: 2605 - protein, 115 aa, synthetic construct
EVQLVESGGGLVQPGGSLRLSCAASGFTFSSYWMGWFRQAPGKEREFVATINWSGVTAYADSVKGRFTISADNSKNTAYLQMNSLKPEDTAVYYCARADDYFDYWGQGTLVTVSS

SEQ ID NO: 2606 - protein, 126 aa, synthetic construct
  VARIANT 63: note = Any amino acid
EVQLVESGGGLVQPGGSLRLSCAASGFTLSGIWMGWFLQAPGKEHEFVAIITTGGRTTYADSXKGRFTSSSDNSKNTAYLQMNLLKPEDTAEYYCAGYSTFGSSSAYYYYSMDVGWGQGTLVTVSS

SEQ ID NO: 2607 - protein, 114 aa, synthetic construct; identical to SEQ ID NO: 2329

SEQ ID NO: 2608 - protein, 125 aa, synthetic construct
EVQLVESGGGLVQPGGSLRLSCAASGSIASIHAMGWFRQAPGKEREFVAAISRSGGFGSYADSVKGRFTISADNSKNTAYLQMNSLKPEDTAVYYCARDDKYYDSSGYPAYFQHWGQGTLVTVSS

SEQ ID NO: 2609 - protein, 113 aa, synthetic construct
EVQLVESGGGLVQPGGSLRLSCAASGLAFNAYAMGWFRQAPGKEREEVATIGWSGANTYYADSVKGRFTISADNSKNTAYLQMNSLKPEDTAVYYCASDPPGWGQGTLVTVSS

SEQ ID NO: 2610 - protein, 116 aa, synthetic construct
EVQLVESGGGLVQPGGSLRLSCAASGSTYTTYSMGWFRQAPGKEREFVAAISGSENVTSYADSVKGRFTISADNSKNTAYLQMNSLKPEDTAVYYCARVDDYMDVWGQGTLVTVSS

SEQ ID NO: 2611 - protein, 123 aa, synthetic construct
EVQLVESGGGLVQPGGSLRLSCAASGLTFNDYAMGWFRQAPGKEREFVAHIPRSTYSPYYADSVKGRFTISADNSKNTAYLQMNSLKPEDTAVYYCAFLVGPQGVDHGAFDVWGQGTLVTVSS

SEQ ID NO: 2612 - protein, 116 aa, synthetic construct
EVQLVESGGGLVQPGGSLRLSCAASGITFRFKAMGWFRQAPGKEREFVAAVSWDGRNTYYADSVKGRFTISADNSKNTAYLQMNSLKPEDTAVYYCASDYYYMDVWGQGTLVTVSS

SEQ ID NO: 2613 - protein, 118 aa, synthetic construct
EVQLVESGGGLVQPGGSLRLSCAASGSTVLINAMGWFRQAPGKEREFVAAVRWSDDYTYYADSVKGRFTISADNSKNTAYLQMNSLKPEDTAVYYCAKEGRAGSLDYWGQGTLVTVSS

SEQ ID NO: 2614 - protein, 123 aa, synthetic construct
EVQLVESGGGLVQPGGSLRLSCAASGFTFDDAAMGWFRQAPGKEREFVAHISWSGGSTYYADSVKGRFTISADNSKNTAYLQMNSLKPEDTAVYYCATFGATVTATNDAFDIWGQGTLVTVSS

SEQ ID NO: 2615 - protein, 123 aa, synthetic construct
EVQLVESGGGLVQPGGSLRLSCAASGNTGSTGYMGWFRQAPGKEREMVAGVINDGSTVYADSVKGRFTISADNSKNTAYLQMNSLKPEDTAVYYCARLATSHQDGTGYLFDYWGQGTLVTVSS

SEQ ID NO: 2616 - protein, 125 aa, synthetic construct
EVQLVESGGGLVQPGGSLRLSCAASGLTFRNYAMGWFRQAPGKEREFIAGMMWSGGTTTYADSVKGRFTISADNSKNTAYLQMNSLKPEDTAVYYCAREGYYYDSSGYLNYFDYWGQGTLVTVSS

SEQ ID NO: 2617 - protein, 120 aa, synthetic construct
EVQLVESGGGLVQPGGSLRLSCAASGSILSIAVMGWFRQAPGKEREFVAAISPSAVTTYYADSVKGRFTISADNSKNTAYLQMNSLKPEDTAVYYCAIGYYDSSGYFDYWGQGTLVTVSS

SEQ ID NO: 2618 - protein, 124 aa, synthetic construct
EVQLVESGGGLVQPGGSLRLSCAASGSTLPYHAMGWFRQAPGKEREFVAAITWNGASTSYADSVKGRFTISADNSKNTAYLQMNSLKPEDTAVYYCARDRYYDTSASYFESETWGQGTLVTVSS

SEQ ID NO: 2619 - protein, 122 aa, synthetic construct
EVQLVESGGGLVQPGGSLRLSCAASGTLFKINAMGWFRQAPGKEREFVAAITSSGSNIDYTYYADSVKGRFTISADNSKNTAYLQMNSLKPEDTAVYYCARSNTGWYSFDYWGQGTLVTVSS

SEQ ID NO: 2620 - protein, 117 aa, synthetic construct
EVQLVESGGGLVQPGGSLRLSCAASGRTFSEVVMGWFRQAPGKEREFVATIHSSGSTSYADSVKGRFTISADNSKNTAYLQMNSLKPEDTAVYYCVRVTSDYSMDSWGQGTLVTVSS

SEQ ID NO: 2621 - protein, 119 aa, synthetic construct
EVQLVESGGGLVQPGGSLRLSCAASGSIFSMNTMGWFRQAPGKEREFVALINRSGGGINYADSVKGRFTISADNSKNTAYLQMNSLKPEDTAVYYCVRLSSGYYDFDYWGQGTLVTVSS

SEQ ID NO: 2622 - protein, 128 aa, synthetic construct
EVQLVESGGGLVQPGGSLRLSCAASGFTLDYYAMGWFRQAPGKEREFVAAINWSGDNTHYADSVKGRFTISADNSKNTAYLQMNSLKPEDTAVYYCARAPFYCTTTKCQDNYYYMDVWGQGTLVTVSS

SEQ ID NO: 2623 - protein, 122 aa, synthetic construct
EVQLVESGGGLVQPGGSLRLSCAASGLTFGTYTMGWFRQAPGKEREFVAAISRFGSTYYADSVKGRFTISADNSKNTAYLQMNSLKPEDTAVYYCARGGDYDFWSVDYMDVWGQGTLVTVSS

SEQ ID NO: 2624 - protein, 115 aa, synthetic construct
EVQLVESGGGLVQPGGSLRLSCAASGDTFSTSWMGWFRQAPGKEREFVATINTGGGTNYADSVKGRFTISADNSKNTAYLQMNSLKPEDTAVYYCARVTTSFDYWGQGTLVTVSS

SEQ ID NO: 2625 - protein, 115 aa, synthetic construct
EVQLVESGGGLVQPGGSLRLSCAASGITFRFKAMGWFRQAPGKEREFVASISRSGTTYYADSVKGRFTISADNSKNTAYLQMNSLKPEDTAVYYCATDYSAFDMWGQGTLVTVSS

SEQ ID NO: 2626 - protein, 118 aa, synthetic construct
EVQLVESGGGLVQPGGSLRLSCAASGDTYGSYWMGWFRQAPGKEREFVATITSDDRTNYADSVKGRFTISADNSKNTAYLQMNSLKPEDTAVYYCARVTSSLSGMDVWGQGTLVTVSS

SEQ ID NO: 2627 - protein, 120 aa, synthetic construct
  VARIANT 47: note = Any amino acid
EVQLVESGGGLVQPGGSLRLSCAASGYTLKNYYAMGWFRQAPGKERXLVAAIIWTGESTLDADSVKGRFTISADNSKNTAYLQMNSLKPEDTAVYYCAREGYYDSSGYYWGQGTLVTVSS

SEQ ID NO: 2628 - protein, 115 aa, synthetic construct
EVQLVESGGGLVQPGGSLRLSCAASGFAFGDSWMGWFRQAPGKEREFVATINWSGVTAYADSVKGRFTISADNSKNTAYLQMNSLKPEDTAVYYCARADGYFDYWGQGTLVTVSS

SEQ ID NO: 2629 - protein, 119 aa, synthetic construct
EVQLVESGGGLVQPGGSLRLSCAASGDTFSANRMGWFRQAPGKEREFVASITWSSANTYYADSVKGRFTISADNSKNTAYLQMNSLKPEDTAVYYCATFNWNDEGFDFWGQGTLVTVSS

SEQ ID NO: 2630 - protein, 124 aa, synthetic construct
EVQLVESGGGLVQPGGSLRLSCAASGFTLDYYDMGWFRQAPGKEREFVALISWSGGSTYYADSVKGRFTISADNSKNTAYLQMNSLKPEDTAVYYCATDFYGWGTRERDAFDIWGQGTLVTVSS

SEQ ID NO: 2631 - protein, 119 aa, synthetic construct
EVQLVESGGGLVQPGGSLRLSCAASGTFQRINHMGWFRQAPGKEREFVATINTGGQPNYADSVKGRFTISADNSKNTAYLQMNSLKPEDTAVYYCASLIAAQDYYFDYWGQGTLVTVSS

SEQ ID NO: 2632 - protein, 119 aa, synthetic construct
EVQLVESGGGLVQPGGSLRLSCAASGSAFRSNAMGWFRQAPGKEREFVAHISWSSKSTYYADSVKGRFTISADNSKNTAYLQMNSLKPEDTAVYYCATYCSSTSCFDYWGQGTLVTVSS

SEQ ID NO: 2633 - protein, 119 aa, synthetic construct
EVQLVESGGGLVQPGGSLRLSCAASGFTLAYYAMGWFRQAPGKEREFVAAISMSGDDTIYADSVKGRFTISADNSKNTAYLQMNSLKPEDTAVYYCARELGYSSTVWPWGQGTLVTVSS

SEQ ID NO: 2634 - protein, 123 aa, synthetic construct
EVQLVESGGGLVQPGGSLRLSCAASGFDFSVSWMGWFRQAPGKEREFVTAITWSGDSTNYADSVKGRFTISADNSKNTAYLQMNSLKPEDTAVYYCASLLHTGPSGGNYFDYWGQGTLVTVSS

SEQ ID NO: 2635 - protein, 118 aa, synthetic construct
EVQLVESGGGLVQPGGSLRLSCAASGHTFSTSWMGWFRQAPGKEREFVATINSLGGTNYADSVKGRFTISADNSKNTAYLQMNSLKPEDTAVYYCARVSSGDYGMDVWGQGTLVTVSS

SEQ ID NO: 2636 - protein, 115 aa, synthetic construct
EVQLVESGGGLVQPGGSLRLSCAASGNTFSGGFMGWFRQAPGKEREFVAVISSLSSKSYADSVKGRFTISADNSKNTAYLQMNSLKPEDTAVYYCAKVDSGYDYWGQGTLVTVSS

SEQ ID NO: 2637 - protein, 125 aa, synthetic construct
EVQLVESGGGLVQPGGSLRLSCAASGFTFSPSWMGWFRQAPGKEREFVAAISWSGGSTAYADSVKGRFTISADNSKNTAYLQMNSLKPEDTAVYYCHGLGEGDPYGDYEGYFDLWGQGTLVTVSS

SEQ ID NO: 2638 - protein, 120 aa, synthetic construct
EVQLVESGGGLVQPGGSLRLSCAASGFTFSDYWMGWFRQAPGKERELVARVWWNGGSAYYADSVKGRFTISADNSKNTAYLQMNSLKPEDTAVYYCAREVLRQQVVLDYWGQGTLVTVSS

SEQ ID NO: 2639 - protein, 128 aa, synthetic construct
EVQLVESGGGLVQPGGSLRLSCAASGFTFSTSWMGWFRQAPGKEREFVASINEYGGRNYADSVKGRFTISADNSKNTAYLQMNSLKPEDTAVYYCAGLHYYYDSSGYNPTEYYGMDVWGQGTLVTVSS

SEQ ID NO: 2640 - protein, 119 aa, synthetic construct
EVQLVESGGGLVQPGGSLRLSCAASGDTYGSYWMGWFRQAPGKEREFVAVITSGGSTNYADSVKGRFTISADNSKNTAYLQMNSLKPEDTAVYYCTHVQNSYYYAMDVWGQGTLVTVSS

SEQ ID NO: 2641 - protein, 127 aa, synthetic construct
EVQLVESGGGLVQPGGSLRLSCAASGRTFSSYAMMGWFRQAPGKEREFVASVNWDASQINYADSVKGRFTISADNSKNTAYLQMNSLKPEDTAVYYCTTLGAVYFDSSGYHDYFDYWGQGTLVTVSS

SEQ ID NO: 2642 - protein, 120 aa, synthetic construct
EVQLVESGGGLVQPGGSLRLSCAASGGTFGVYHMGWFRQAPGKEREFIGRITWTDGSTYYADSVKGRFTISADNSKNTAYLQMNSLKPEDTAVYYCFGLLEVYDMTFDYWGQGTLVTVSS

SEQ ID NO: 2643 - protein, 121 aa, synthetic construct
EVQLVESGGGLVQPGGSLRLSCAASGNMFSINAMGWFRQAPGKEREFVTLISWSSGRTSYADSVKGRFTISADNSKNTAYLQMNSLKPEDTAVYYCASLGYCSGGSCFDYWGQGTLVTVSS

SEQ ID NO: 2644 - protein, 118 aa, synthetic construct
EVQLVESGGGLVQPGGSLRLSCAASGLTFSAMGWFRQAPGKEREFVALIRRDGSTIYADSVKGRFTISADNSKNTAYLQMNSLKPEDTAVYYCAALGILFGYDAFDIWGQGTLVTVSS

SEQ ID NO: 2645 - protein, 123 aa, synthetic construct
EVQLVESGGGLVQPGGSLRLSCAASGRTFSMHAMGWFRQAPGKERELVASITYGGNINYADSVKGRFTISADNSKNTAYLQMNSLKPEDTAVYYCAKEGYYDSTGYRTYFQQWGQGTLVTVSS

SEQ ID NO: 2646 - protein, 117 aa, synthetic construct
EVQLVESGGGLVQPGGSLRLSCAASGFTVSNYAMGWFRQAPGKEREFVASVNWSGGTTSYADSVKGRFTISADNSKNTAYLQMNSLKPEDTAVYYCATTGTVTLGYWGQGTLVTVSS

SEQ ID NO: 2647 - protein, 121 aa, synthetic construct
EVQLVESGGGLVQPGGSLRLSCAASGSTVLINAMGWFRQAPGKEREFVAAISWSPGRTDYADSVKGRFTISADNSKNTAYLQMNSLKPEDTAVYYCARDCSGGSCYSGDYWGQGTLVTVSS

SEQ ID NO: 2648 - protein, 117 aa, synthetic construct
EVQLVESGGGLVQPGGSLRLSCAASGFSFDRWAMGWFRQAPGKEREWVASLATGGNTNYADSVKGRFTISADNSKNTAYLQMNSLKPEDTAVYYCARVTNYDAFDIWGQGTLVTVSS

SEQ ID NO: 2649 - protein, 122 aa, synthetic construct
EVQLVESGGGLVQPGGSLRLSCAASGYTYSSYVMGWFRQAPGKEREFVAAISRFGSTYYADSVKGRFTISADNSKNTAYLQMNSLKPEDTAVYYCARDSGEHFWDSGYIDHWGQGTLVTVSS

SEQ ID NO: 2650 - protein, 115 aa, synthetic construct
EVQLVESGGGLVQPGGSLRLSCAASGDTYGSYWMGWFRQAPGKEREVVAAITSGGSTVYADSVKGRFTISADNSKNTAYLQMNSLKPEDTAVYYCARVDSRFDYWGQGTLVTVSS

SEQ ID NO: 2651 - protein, 117 aa, synthetic construct
EVQLVESGGGLVQPGGSLRLSCAASGISINTNVMGWFRQAPGKEREFVAAISTGSVTIYADSVKGRFTISADNSKNTAYLQMNSLKPEDTAVYYCARVDDFGYFDLWGQGTLVTVSS

SEQ ID NO: 2652 - protein, 123 aa, synthetic construct
EVQLVESGGGLVQPGGSLRLSCAASGFEFENHWMGWFRQAPGKEREYVAHITAGGLSNYADSVKGRFTISADNSKNTAYLQMNSLKPEDTAVYYCGRHWGIYDSSGFSSFDYWGQGTLVTVSS

SEQ ID NO: 2653 - protein, 115 aa, synthetic construct
EVQLVESGGGLVQPGGSLRLSCAASGFTMSSSWMGWFRQAPGKEREFVARITSGGSTGYADSVKGRFTISADNSKNTAYLQMNSLKPEDTAVYYCASVDGYFDYWGQGTLVTVSS

SEQ ID NO: 2654 - protein, 118 aa, synthetic construct
EVQLVESGGGLVQPGGSLRLSCAASGNIFRSNMGWFRQAPGKEREFVAGITWNGDTTYYADSVKGRFTISADNSKNTAYLQMNSLKPEDTAVYYCARALGVTYQFDYWGQGTLVTVSS

SEQ ID NO: 2655 - protein, 118 aa, synthetic construct
EVQLVESGGGLVQPGGSLRLSCAASGLTFDDHSMGWFRQAPGKEREFVAAVPLSGNTYYADSVKGRFTISADNSKNTAYLQMNSLKPEDTAVYYCASFSGGPADFDYWGQGTLVTVSS

SEQ ID NO: 2656 - protein, 122 aa, synthetic construct
EVQLVESGGGLVQPGGSLRLSCAASGRAVSTYAMGWFRQAPGKEREFVAAISGSENVTSYADSVKGRFTISADNSKNTAYLQMNSLKPEDTAVYYCLSVTGDTEDYGVFDTWGQGTLVTVSS

SEQ ID NO: 2657 - protein, 123 aa, synthetic construct
EVQLVESGGGLVQPGGSLRLSCAASGISGSVFSRTPMGWFRQAPGKEREWVSSIYSDGSNTYYADSVKGRFTISADNSKNTAYLQMNSLKPEDTAVYYCAHWSWELGDWFDPWGQGTLVTVSS

SEQ ID NO: 2658 - protein, 123 aa, synthetic construct
EVQLVESGGGLVQPGGSLRLSCAASGDTYGSYWMGWFRQAPGKEREFVATISQSGAATAYADSVKGRFTISADNSKNTAYLQMNSLKPEDTAVYYCAGLLRYSGTYYDAFDVWGQGTLVTVSS

SEQ ID NO: 2659 - protein, 117 aa, synthetic construct
EVQLVESGGGLVQPGGSLRLSCAASGDTYGSYWMGWFRQAPGKEREFVAAINWSGGSTNYADSVKGRFTITADNNKNTAYLQMNSLKPEDTAVYYCAGLGWNYMDYWGQGTLVTVSS

SEQ ID NO: 2660 - protein, 118 aa, synthetic construct
EVQLVESGGGLVQPGGSLRLSCAASGSTFSGNWMGWFRQAPGKEREFVAVISWTGGSTYYADSVKGRFTISADNSKNTAYLQMNSLKPEDTAVYYCATHNSLSGFDYWGQGTLVTVSS

SEQ ID NO: 2661 - protein, 113 aa, synthetic construct
EVQLVESGGGLVQPGGSLRLSCAASGQTFNMGWFRQAPGKEREFVAAIGSGGSTSYADSVKGRFTISADNSKNTAYLQMNSLKPEDTAVYYCWRLGNDYFDYWGQGTLVTVSS

SEQ ID NO: 2662 - protein, 116 aa, synthetic construct
EVQLVESGGGLVQPGGSLRLSCAASGIPSIHAMGWFRQAPGKERELVAAINWSHGVTYYADSVKGRFTISADNSKNTAYLQMNSLKPEDTAVYYCGGGYGYHFDYWGQGTLVTVSS

SEQ ID NO: 2663 - protein, 126 aa, synthetic construct
EVQLVESGGGLVQPGGSLRLSCAASGLPFSTLHMGWFRQAPGKEREFVASLSIFGATGYADSVKGRFTISADNSKNTAYLQMNSLKPEDTAVYYCWMYYYDSSGYYGNYYYGMDVWGQGTLVTVSS

SEQ ID NO: 2664 - protein, 126 aa, synthetic construct
EVQLVESGGGLVQPGGSLRLSCAASGLTFSLFAMGWFRQAPGKERELVAAISSGGSTDYADSVKGRFTISADNSKNTAYLQMNSLKPEDTAVYYCARGNTKYYYDSSGYSSAFDYWGQGTLVTVSS

SEQ ID NO: 2665 - protein, 119 aa, synthetic construct
EVQLVESGGGLVQPGGSLRLSCAASGSFSNYAMGWFRQAPGKEREFVAAISSSGALTSYADSVKGRFTISADNSKNTAYLQMNSLKPEDTAVYYCWIVGPGPLDGMDVWGQGTLVTVSS

SEQ ID NO: 2666 - protein, 120 aa, synthetic construct
EVQLVESGGGLVQPGGSLRLSCAASGFTLSDRAMGWFRQAPGKEREYVAHITAGGLSNYADSVKGRFTISADNSKNTAYLQMNSLKPEDTAVYYCVHLASQTGAGYFDLWGQGTLVTVSS

SEQ ID NO: 2667 - protein, 117 aa, synthetic construct
EVQLVESGGGLVQPGGSLRLSCAASGGTFSSVGMGWFRQAPGKEREFVAGISRSGGTYYADSVKGRFTISADNSKNTAYLQMNSLKPEDTAVYYCARYDFWSGYPYWGQGTLVTVSS

SEQ ID NO: 2668 - protein, 123 aa, synthetic construct
EVQLVESGGGLVQPGGSLRLSCAASGFNLDDYADMGWFRQAPGKEREFVAAIGWGGGSTRYADSVKGRFTISADNSKNTAYLQMNSLKPEDTAVYYCAREILWFGEFGEPNVWGQGTLVTVSS

SEQ ID NO: 2669 - protein, 123 aa, synthetic construct
EVQLVESGGGLVQPGGSLRLSCAASGITFSNDAMGWFRQAPGKEREFVAIITSSDTNDTTNYADSVKGRFTISADNSKNTAYLQMNSLKPEDTAVYYCARLHYYDSSGYFDYWGQGTLVTVSS

SEQ ID NO: 2670 - protein, 120 aa, synthetic construct
EVQLVESGGGLVQPGGSLRLSCAASGSTLSINAMGWFRQAPGKEREFVAAIDWSGGSTAYADSVKGRFTISADNSKNTAYLQMNSLKPEDTAVYYCARDSSATRTGPDYWGQGTLVTVSS

SEQ ID NO: 2671 - protein, 116 aa, synthetic construct
EVQLVESGGGLVQPGGSLRLSCAASGHTFSGYAMGWFRQAPGKEREFVAVITREGSTYYADSVKGRFTISADNSKNTAYLQMNSLKPEDTAVYYCARLGGEGFDYWGQGTLVTVSS

SEQ ID NO: 2672 - protein, 119 aa, synthetic construct
EVQLVESGGGLVQPGGSLRLSCAASGFAFGDSWMGWFRQAPGKERELVAAITSGGSTDYADSVKGRFTISADNSKNTAYLQMNSLKPEDTAVYYCARGLLWFGELFGYWGQGTLVTVSS

SEQ ID NO: 2673 - protein, 121 aa, synthetic construct
EVQLVESGGGLVQPGGSLRLSCAASGGTFSTYWMGWFRQAPGKEREFVAAISRSGGNTYYADSVKGRFTISADNSKNTAYLQMNSLKPEDTAVYYCVRHSGTDGDSSFDYWGQGTLVTVSS

SEQ ID NO: 2674 - protein, 115 aa, synthetic construct
EVQLVESGGGLVQPGGSLRLSCAASGLAFDFDGMGWFRQAPGKEREGVAAINSGGSTYYADSVKGRFTISADNSKNTAYLQMNSLKPEDTAVYYCARFFRAHDYWGQGTLVTVSS

SEQ ID NO: 2675 - protein, 115 aa, synthetic construct
EVQLVESGGGLVQPGGSLRLSCAASGFTFDRSWMGWFRQAPGKEREFVAAVTEGGTTSYADSVKGRFTISADNSKNTAYLQMNSLKPEDTAVYYCARADYDFDYWGQGTLVTVSS

SEQ ID NO: 2676 - protein, 119 aa, synthetic construct
EVQLVESGGGLVQPGGSLRLSCAASGRTYDAMGWFRQAPGKEREFVASVTSGGYTHYADSVKGRFTISADNSKNTAYLQMNSLKPEDTAVYYCAKFGRKIVGATELDYWGQGTLVTVSS

SEQ ID NO: 2677 - protein, 124 aa, synthetic construct
EVQLVESGGGLVQPGGSLRLSCAASGSISSIDYMGWFRQAPGKEREGVSWISSSDGSTYYADSVKGRFTISADNSKNTAYLQMNSLKPEDTAVYYCARSPSFSQIYYYYYMDVWGQGTLVTVSS

SEQ ID NO: 2678 - protein, 124 aa, synthetic construct; identical to SEQ ID NO: 2328

SEQ ID NO: 2679 - protein, 125 aa, synthetic construct; identical to SEQ ID NO: 2333

SEQ ID NO: 2680 - protein, 119 aa, synthetic construct
EVQLVESGGGLVQPGGSLRLSCAASGSSLDAYGMGWFRQAPGKEREFVAAISWGGGSIYYADSVKGRFTISADNSKNTAYLQMNSLKPEDTAVYYCARLSQGMVALDYWGQGTLVTVSS

SEQ ID NO: 2681 - protein, 122 aa, synthetic construct
EVQLVESGGGLVQPGGSLRLSCAASGSIASIHAMGWFRQAPGKEREFVAAITWSGAITSYADSVKGRFTISADNSKNTAYLQMNSLKPEDTAVYYCAKDGGYGELHYGMEVWGQGTLVTVSS

SEQ ID NO: 2682 - protein, 113 aa, synthetic construct
EVQLVESGGGLVQPGGSLRLSCAASGFTPDDYAMGWFRQAPGKEREFVAAINSGGSYTYYADSVKGRFTISADNSKNTAYLQMNSLKPEDTAVYYCARDRGPWGQGTLVTVSS

SEQ ID NO: 2683 - protein, 115 aa, synthetic construct
EVQLVESGGGLVQPGGSLRLSCAASGGTFSVFAMGWFRQAPGKEREFVSAINWSGGSLLYADSVKGRFTISADNSKNTAYLQMNSLKPEDTAVYYCALFGDFDYWGQGTLVTVSS

SEQ ID NO: 2684 - protein, 118 aa, synthetic construct
EVQLVESGGGLVQPGGSLRLSCAASGPISGINRMGWFRQAPGKEREFVAVITSNGRPSYADSVKGRFTISADNSKNTAYLQMNSLKPEDTAVYYCVRLSSGYFDFDYWGQGTLVTVSS

SEQ ID NO: 2685 - protein, 117 aa, synthetic construct
EVQLVESGGGLVQPGGSLRLSCAASGTSIMVGAMGWFRQAPGKEREFVAIIRGDGRTSYADSVKGRFTISADNSKNTAYLQMNSLKPEDTAVYYCARFAGWDAFDIWGQGTLVTVSS

SEQ ID NO: 2686 - protein, 120 aa, synthetic construct
EVQLVESGGGLVQPGGSLRLSCAASGRTFSTHWMGWFRQAPGKEREFVAVINWSGGSIYYADSVKGRFTISADNSKNTAYLQMNSLKPEDTAVYYCARLSSDGYNYFDFWGQGTLVTVSS

SEQ ID NO: 2687 - protein, 115 aa, synthetic construct
EVQLVESGGGLVQPGGSLRLSCAASGTIFASAMGWFRQAPGKEHQFVAVVNWNGSSTVYADNVKGRFTIIADNSKNTAYLQMNSLKPEDTAVYYCTTVDQYFNYWGQGTLVTVSS

SEQ ID NO: 2688 - protein, 119 aa, synthetic construct
EVQLVESGGGLVQPGGSLRLSCAASGFPFSIWPMGWFRQAPGKEREFVAAVRWSSTYYADSVKGRFTISADNSKNTAYLQMNSLKPEDTAVYYCATGECDGGSCSLAYWGQGTLVTVSS

SEQ ID NO: 2689 - protein, 120 aa, synthetic construct
EVQLVESGGGLVQPGGSLRLSCAASGRTFGNYAMGWFRQAPGKEREFVASISSSGVSKHYADSVKGRFTISADNSKNTAYLQMNSLKPEDTAVYYCVRFGSSWARDLDQWGQGTLVTVSS

SEQ ID NO: 2690 - protein, 117 aa, synthetic construct
EVQLVESGGGLVQPGGSLRLSCAASGFLFDSYASMGWFRQAPGKEREFVATIWRRGNTYYANYADSVKGRFTISADNSKNTAYLQMNSLKPEDTAVYYCTETGTAAWGQGTLVTVSS

SEQ ID NO: 2691 - protein, 122 aa, synthetic construct
EVQLVESGGGLVQPGGSLRLSCAASGLPFSTKSMGWFRQAPGKEREFVAAISMSGLTSYADSVKGRFTISADNSKNTAYLQMNSLKPEDTAVYYCLKVLGGDYEADNWFDYWGQGTLVTVSS

SEQ ID NO: 2692 - protein, 123 aa, synthetic construct
EVQLVESGGGLVQPGGSLRLSCAASGNIFRIETMGWFRQAPGKEREFVAGIIRSGGETLYADSVKGRFTISADNSKNTAYLQMNSLKPEDTAVYYCARSLYYDRSGSYYFDYWGQGTLVTVSS

SEQ ID NO: 2693 - protein, 127 aa, synthetic construct
EVQLVESGGGLVQPGGSLRLSCAASGIPSSIRAMGWFRQAPGKEREFVAVIRWTGGSTYYADSVKGRFTISADNSKNTAYLQMNSLKPEDTAVYYCARDIGYYDSSGYYNDGGFDYWGQGTLVTVSS

SEQ ID NO: 2694 - protein, 125 aa, synthetic construct
EVQLVESGGGLVQPGGSLRLSCAASGFTLSGNWMGWFRQAPGKEREFVAIITSGGRTNYADSVKGRFTISADNSKNTAYLQMNSLKPEDTAVYYCAGHATFGGSSSSYYYGMDVWGQGTLVTVSS

SEQ ID NO: 2695 - protein, 117 aa, synthetic construct
EVQLVESGGGLVQPGGSLRLSCAASGFTFSSLAMGWFRQAPGKEREFVAAITWSGDITNYADSVKGRFTITADNSKNTAYLQMNSLKPEDTAVYYCLRLSSSGFDHWGQGTLVTVSS

SEQ ID NO: 2696 - protein, 124 aa, synthetic construct
EVQLVESGGGLVQPGGSLRLSCAASGTFGHYAMGWFRQAPGKEREFVAAINWSSRSTVYADSVKGRFTITADNSKNTAYLQMNSLKPEDTAVYYCAKSDGLMGELRSASAFDIWGQGTLVTVSS

SEQ ID NO: 2697 - protein, 116 aa, synthetic construct
EVQLVESGGGLVQPGGSLRLSCAASGIPFRSRTMGWFRQAPGKEREFVAGISRSGASTAYADSVKGRFTISADNSKNTAYLQMNSLKPEDTAVYYCTHANDYGDYWGQGTLVTVSS

SEQ ID NO: 2698 - protein, 119 aa, synthetic construct
EVQLVESGGGLVQPGGSLRLSCAASGGTFSTSWMGWFRQAPGKEREYVAHITAGGLSNYADSVKGRFTISADNSKNTAYLQMNSLKPEDTAVYYCARLLVREDWYFDLWGQGTLVTVSS

SEQ ID NO: 2699 - protein, 119 aa, synthetic construct
EVQLVESGGGLVQPGGSLRLSCAASGGTFSLFAMGWFRQAPGKEREFVAAISWTGDSTYYKYYADSVKGRFTISADNSKNTAYLQMNSLKPEDTAVYYCAYNNSSGEYWGQGTLVTVSS

SEQ ID NO: 2700 - protein, 118 aa, synthetic construct
EVQLVESGGGLVQPGGSLRLSCAASGSSFSAYAMGWFRQAPGKEREFVSAIDSEGTTTYADSVKGRFTISADNSKNTAYLQMNSLKPEDTAVYYCAGDYNFWSGFDHWGQGTLVTVSS

SEQ ID NO: 2701 - protein, 118 aa, synthetic construct
EVQLVESGGGLVQPGGSLRLSCAASGRTSSPIAMGWFRQAPGKEREPVAVRWSDDYTYYADSVKGRFTISADNSKNTAYLQMNSLKPEDTAVYYCAKKLGGYYAFDIWGQGTLVTVSS

SEQ ID NO: 2702 - protein, 115 aa, synthetic construct
EVQLVESGGGLVQPGGSLRLSCAASGLTFNQYTMGWFRQAPGKEREFVASITDGGSTYYADSVKGRFTISADNSKNTAYLQMNSLKPEDTAVYYCARDSRYMDVWGQGTLVTVSS

SEQ ID NO: 2703 - protein, 115 aa, synthetic construct
EVQLVESGGGLVQPGGSLRLSCAASGPTFSSMGWFRQAPGKEREFVAAISWDGGATAYADSVKGRFTISADNSKNTAYLQMNSLKPEDTAVYYCAIEIVVGGIYWGQGTLVTVSS

SEQ ID NO: 2704 - protein, 116 aa, synthetic construct
EVQLVESGGGLVQPGGSLRLSCAASGIPSTLRAMGWFRQAPGKEREFVAATSWSGGSKYYADSVKGRFTISADNSKNTAYLQMNSLKPEDTAVYYCATDLYYMDVWGQGTLVTVSS

SEQ ID NO: 2705 - protein, 119 aa, synthetic construct
EVQLVESGGGLVQPGGSLRLSCAASGGVGFSVTNMGWFRQAPGKEREFVAVISSSSSTNYADSVKGRFTISADNSKNTAYLQMNSLKPEDTAVYYCTTFNWNDEGFDYWGQGTLVTVSS

SEQ ID NO: 2706 - protein, 125 aa, synthetic construct
EVQLVESGGGLVQPGGSLRLSCAASGGTFGSYGMGWFRQAPGKEREFVAAIRWSGGITYYADSVKGRFTISADNSKNTAYLQMNSLKPEDTAVYYCARERYWNPLPYYYYGMDVWGQGTLVTVSS

SEQ ID NO: 2707 - protein, 128 aa, synthetic construct
EVQLVESGGGLVQPGGSLRLSCAASGGTFSTYAMGWFRQVPGKEREFVASIDWSGLTSYADSVKGRFTISADNSKNTAYLQMNSLKPEDTAVYYCARGPFYMYCSGTKCYSTNWFDPWGQGTLVTVSS

SEQ ID NO: 2708 - protein, 122 aa, synthetic construct
EVQLVESGGGLVQPGGSLRLSCAASGPIYAVNRMGWFRQAPGKEREFVAGIWRSGGHRDYADSVKGRFTISADNSKNTAYLQMNSLKPEDTAVYYCARGEIDILTGYWYDYWGQGTLVTVSS

SEQ ID NO: 2709 - protein, 126 aa, synthetic construct
EVQLVESGGGLVQPGGSLRLSCAASGFTFSNYWMGWFRQAPGKEREFVGGISRSGVSTSYADSVKGRFTISADNSKNTAYLQMNSLKPEDTAVYYCTTLLYYYDSSGYSFDAFDIWGQGTLVTVSS

SEQ ID NO: 2710 - protein, 125 aa, synthetic construct
EVQLVESGGGLVQPGGSLRLSCAASGGTFSAYHMGWFRQAPGKERELVTIIDNGGPTSYADSVKGRFTISADNSKNTAYLQMNSLKPEDTAVYYCTALLYYFDNSGYNFDPFDIWGQGTLVTGSS

SEQ ID NO: 2711 - protein, 126 aa, synthetic construct; identical to SEQ ID NO: 2334

SEQ ID NO: 2712 - protein, 122 aa, synthetic construct; identical to SEQ ID NO: 2335

SEQ ID NO: 2713 - protein, 122 aa, synthetic construct; identical to SEQ ID NO: 2336

SEQ ID NO: 2714 - protein, 129 aa, synthetic construct; identical to SEQ ID NO: 2337

SEQ ID NO: 2715 - protein, 122 aa, synthetic construct
EVQLLESGGGLVQPGGSLRLSCAASGFTFSDFAMAWVRQAPGKGLEWVSAISGSGDITYYADSVKGRFTISRDNSKNTLYLQMNSLRAEDTAVYYCAREADCLPSPWYLDLWGQGTLVTVSS

SEQ ID NO: 2716 - protein, 122 aa, synthetic construct; identical to SEQ ID NO: 2336

SEQ ID NO: 2717 - protein, 117 aa, synthetic construct; identical to SEQ ID NO: 2339

SEQ ID NO: 2718 - protein, 122 aa, synthetic construct; identical to SEQ ID NO: 2340

SEQ ID NO: 2719 - protein, 117 aa, synthetic construct; identical to SEQ ID NO: 2341

SEQ ID NO: 2720 - protein, 117 aa, synthetic construct; identical to SEQ ID NO: 2342

SEQ ID NO: 2721 - protein, 117 aa, synthetic construct; identical to SEQ ID NO: 2343

SEQ ID NO: 2722 - protein, 117 aa, synthetic construct; identical to SEQ ID NO: 2344

SEQ ID NO: 2723 - protein, 122 aa, synthetic construct; identical to SEQ ID NO: 2336

SEQ ID NO: 2724 - protein, 122 aa, synthetic construct; identical to SEQ ID NO: 2336

SEQ ID NO: 2725 - protein, 116 aa, synthetic construct; identical to SEQ ID NO: 2347

SEQ ID NO: 2726 - protein, 107 aa, synthetic construct
DIQMTQSPSSLSASVGDRVTITCRASQSIHRFLNWYQQKPGKAPKLLIYAASNLHSGVPSRFSGSGSGTDFTLTISSLQPEDFATYYCQQSYGLPPTFGQGTKVEIK

SEQ ID NO: 2727 - protein, 108 aa, synthetic construct
DIQMTQSPSSLSASVGDRVTITCRASQSIHISLNWYQQKPGKAPKLLIYLASPLASGVPSRFSGSGSGTDFTLTISSLQPEDFATYYCQQSYSAPPYTFGQGTKVEIK

SEQ ID NO: 2728 - protein, 108 aa, synthetic construct
DIQMTQSPSSLSASVGDRVTITCRASQSIHTYLNWYQQKPGKAPKLLIYAASALASGVPSRFSGSGSGTDFTLTISSLQPEDFATYYCQQSYSAPPYTFGQGTKVEIK

SEQ ID NO: 2729 - protein, 106 aa, synthetic construct
DIQMTQSPSSLSASVGDRVTITCRASQTINTYLNWYQQKPGKAPKLLIYSASTLQSGVPSRFSGSGSGTDFTLTISSLQPEDFATYYCQQSYSTFTFGQGTKVEIK

SEQ ID NO: 2730 - protein, 108 aa, synthetic construct
DIQMTQSPSSLSASVGDRVTITCRASQNIHTYLNWYQQKPGKAPKLLIYAASTFAKGVPSRFSGSGSGTDFTLTISSLQPEDFATYYCQQSYSAPPYTFGQGTKVEIK

SEQ ID NO: 2731 - protein, 108 aa, synthetic construct
DIQMTQSPSSLSASVGDRVTITCRASQSIDTYLNWYQQKPGKAPKLLIYAASALASGVPSRFSGSGSGTDFTLTISSLQPEDFATYYCQQSYSAPPYTFGQGTKVEIK

SEQ ID NO: 2732 - protein, 107 aa, synthetic construct
DIQMTQSPSSLSASVGDRVTITCRASQSIGNYLNWYQQKPGKAPKLLIYGVSSLQSGVPSRFSGSGSGTDFTLTISSLQPEDFATYYCQQSHSAPLTFGQGTKVEIK

SEQ ID NO: 2733 - protein, 108 aa, synthetic construct; identical to SEQ ID NO: 2731

SEQ ID NO: 2734 - protein, 108 aa, synthetic construct
DIQMTQSPSSLSASVGDRVTITCRASQSIDNYLNWYQQKPGKAPKLLIYGVSALQSGVPSRFSGSGSGTDFTLTISSLQPEDFATYYCQQSHSAPPYFFGQGTKVEIK

SEQ ID NO: 2735 - protein, 108 aa, synthetic construct
DIQMTQSPSSLSASVGDRVTITCRASQSIDTYLNWYQQKPGKAPKLLIYGASALESGVPSRFSGSGSGTDFTLTISSLQPEDFATYYCQQSHSAPPYFFGQGTKVEIK

SEQ ID NO: 2736 - protein, 108 aa, synthetic construct; identical to SEQ ID NO: 2731

SEQ ID NO: 2737 - protein, 108 aa, synthetic construct
DIQMTQSPSSLSASVGDRVTITCRASQSIDTYLNWYQQKPGKAPKLLIYGVSALQSGVPSRFSGSGSGTDFTLTISSLQPEDFATYYCQQSYSAPPYFFGQGTKVEIK

SEQ ID NO: 2738 - protein, 108 aa, synthetic construct; identical to SEQ ID NO: 2731

SEQ ID NO: 2739 - protein, 107 aa, synthetic construct
DIQMTQSPSSLSASVGDRVTITCRASQSIDNYLNWYQQKPGKAPKLLIYGVSALQSGVPSRFSGSGSGTDFTLTISSLQPEDFATYYCQQSHSAPLTFGQGTKVEIK

SEQ ID NO: 2740 - protein, 107 aa, synthetic construct
DIQMTQSPSSLSASVGDRVTITCRASQRIGTYLNWYQQKPGKAPKLLIYAASNLEGGVPSRFSGSGSGTDFTLTISSLQPEDFATYYCQQNYSTTWTFGQGTKVEIK

SEQ ID NO: 2741 - protein, 121 aa, synthetic construct; identical to SEQ ID NO: 2348

SEQ ID NO: 2742 - protein, 123 aa, synthetic construct; identical to SEQ ID NO: 2349

SEQ ID NO: 2743 - protein, 123 aa, synthetic construct; identical to SEQ ID NO: 2350

SEQ ID NO: 2744 - protein, 121 aa, synthetic construct; identical to SEQ ID NO: 2351

SEQ ID NO: 2745 - protein, 119 aa, synthetic construct; identical to SEQ ID NO: 2352

SEQ ID NO: 2746 - protein, 110 aa, synthetic construct
DIQMTQSPSSLSASVGDRVTITCTGTSSDVGSYDLVSWYQQKPGKAPKLLIYEGNKRPSGVPSRFSGSGSGTDFTLTISSLQPEDFATYYCCSYAGSSVVFGQGTKVEIK

SEQ ID NO: 2747 - protein, 110 aa, synthetic construct
DIQMTQSPSSLSASVGDRVTITCTGTSSDVGSSNLVSWYQQKPGKAPKLLIYEGSKRPSGVPSRFSGSGSGTDFTLTISSLQPEDFATYYCCSYAGSLYVFGQGTKVEIK

SEQ ID NO: 2748 - protein, 111 aa, synthetic construct
DIQMTQSPSSLSASVGDRVTITCTGTSSDIGSYNLVSWYQQKPGKAPKLLIYEGTKRPSGVPSRFSGSGSGTDFTLTISSLQPEDFATYYCCSYAGSRTYVFGQGTKVEIK

SEQ ID NO: 2749 - protein, 112 aa, synthetic construct
DIQMTQSPSSLSASVGDRVTITCTGTSTDVGSYNLVSWYQQKPGKAPKLLIYEGTKRPSGVPSRFSGSGSGTDFTLTISSLQPEDFATYYCCSYAGSYTSVVFGQGTKVEIK

SEQ ID NO: 2750 - protein, 112 aa, synthetic construct
DIQMTQSPSSLSASVGDRVTITCTGTSSNVGSYNLVSWYQQKPGKAPKLLIYEGTKRPSGVPSRFSGSGSGTDFTLTISSLQPEDFATYYCCSYAGSSSFVVFGQGTKVEIK

SEQ ID NO: 2751 - protein, 126 aa, synthetic construct; identical to SEQ ID NO: 2361

SEQ ID NO: 2752 - protein, 121 aa, synthetic construct; identical to SEQ ID NO: 2362

SEQ ID NO: 2753 - protein, 123 aa, synthetic construct; identical to SEQ ID NO: 2363

SEQ ID NO: 2754 - protein, 122 aa, synthetic construct; identical to SEQ ID NO: 2364

SEQ ID NO: 2755 - protein, 121 aa, synthetic construct; identical to SEQ ID NO: 2365

SEQ ID NO: 2756 - protein, 122 aa, synthetic construct; identical to SEQ ID NO: 2366

SEQ ID NO: 2757 - protein, 126 aa, synthetic construct; identical to SEQ ID NO: 2367

SEQ ID NO: 2758 - protein, 121 aa, synthetic construct; identical to SEQ ID NO: 2368

SEQ ID NO: 2759 - protein, 121 aa, synthetic construct; identical to SEQ ID NO: 2369

SEQ ID NO: 2760 - protein, 126 aa, synthetic construct; identical to SEQ ID NO: 2361

SEQ ID NO: 2761 - protein, 121 aa, synthetic construct; identical to SEQ ID NO: 2371

SEQ ID NO: 2762 - protein, 123 aa, synthetic construct; identical to SEQ ID NO: 2372

SEQ ID NO: 2763 - protein, 126 aa, synthetic construct; identical to SEQ ID NO: 2361

SEQ ID NO: 2764 - protein, 126 aa, synthetic construct; identical to SEQ ID NO: 2374

SEQ ID NO: 2765 - protein, 121 aa, synthetic construct; identical to SEQ ID NO: 2375

SEQ ID NO: 2766 - protein, 107 aa, synthetic construct
DIQMTQSPSSLSASVGDRVTITCRASQSIRKYLNWYQQKPGKAPKLLIYASSTLQRGVPSRFSGSGSGTDFTLTISSLQPEDFATYYCQQSLSTPFTFGQGTKVEIK

SEQ ID NO: 2767 - protein, 107 aa, synthetic construct
DIQMTQSPSSLSASVGDRVTITCRASQNIKTYLNWYQQKPGKAPKLLIYAASKLQSGVPSRFSGSGSGTDFTLTISSLQPEDFATYYCQQSYSTSPTFGQGTKVEIK

SEQ ID NO: 2768 - protein, 103 aa, synthetic construct
DIQMTQSPSSLSASVGDRVTITCRASQTIYSYLNWYQQKPGKAPKLLIYATSTLQGGVPSRFSGSGSGTDFTLTISSLQPEDFATYYCQHRGTFGQGTKVEIK

SEQ ID NO: 2769 - protein, 107 aa, synthetic construct
DIQMTQSPSSLSASVGDRVTITCRASRSIRRYLNWYQQKPGKAPKLLIYASSSLQAGVPSRFSGSGSGTDFTLTISSLQPEDFATYYCQQSYSTLLTFGQGTKVEIK

SEQ ID NO: 2770 - protein, 107 aa, synthetic construct
DIQMTQSPSSLSASVGDRVTITCRASQSIGKYLNWYQQKPGKAPKLLIYASSSLQSGVPSRFSGSGSGTDFTLTISSLQPEDFATYYCQQSYSPPFTFGQGTKVEIK

SEQ ID NO: 2771 - protein, 107 aa, synthetic construct
DIQMTQSPSSLSASVGDRVTITCRASRSISRYLNWYQQKPGKAPKLLIYAASSLQAGVPSRFSGSGSGTDFTLTISSLQPEDFATYYCQQSYSSLLTFGQGTKVEIK

SEQ ID NO: 2772 - protein, 107 aa, synthetic construct
DIQMTQSPSSLSASVGDRVTITCRASQSIGKYLNWYQQKPGKAPKLLIYASSTLQRGVPSRFSGSGSGTDFTLTISSLQPEDFATYYCQQSLSPPFTFGQGTKVEIK

SEQ ID NO: 2773 - protein, 107 aa, synthetic construct
DIQMTQSPSSLSASVGDRVTITCRASQSIGRYLNWYQQKPGKAPKLLIYASSSLQSGVPSRFSGSGSGTDFTLTISSLQPEDFATYYCQQSYSLPRTFGQGTKVEIK

SEQ ID NO: 2774 - protein, 107 aa, synthetic construct
DIQMTQSPSSLSASVGDRVTITCRASQSIGRYLNWYQQKPGKAPKLLIYAASSLKSGVPSRFSGSGSGTDFTLTISSLQPEDFATYYCQQSYSLPRTFGQGTKVEIK

SEQ ID NO: 2775 - protein, 107 aa, synthetic construct
DIQMTQSPSSLSASVGDRVTITCRASQSIGKYLNWYQQKPGKAPKLLIYASSTLQRGVPSRFSGSGSGTDFTLTISSLQPEDFATYYCQQSLSTPFTFGQGTKVEIK

SEQ ID NO: 2776 - protein, 107 aa, synthetic construct
DIQMTQSPSSLSASVGDRVTITCRASQSIGRYLNWYQQKPGKAPKLLIYAASSLKSGVPSRFSGSGSGTDFTLTISSLQPEDFATYYCQQSYSLPLTFGQGTKVEIK

SEQ ID NO: 2777 - protein, 107 aa, synthetic construct
DIQMTQSPSSLSASVGDRVTITCRTSQSINTYLNWYQQKPGKAPKLLIYGASNVQSGVPSRFSGSGSGTDFTLTISSLQPEDFATYYCQQSYRIPRTFGQGTKVEIK

SEQ ID NO: 2778 - protein, 107 aa, synthetic construct
DIQMTQSPSSLSASVGDRVTITCRASQSIGKYLNWYQQKPGKAPKLLIYASSTLQRGVPSRFSGSGSGTDFTLTISSLQPEDFATYYCQQSFSPPFTFGQGTKVEIK

SEQ ID NO: 2779 - protein, 107 aa, synthetic construct
DIQMTQSPSSLSASVGDRVTITCRASQSIGKYLNWYQQKPGKAPKLLIYASSTLQRGVPSRFSGSGSGTDFTLTISSLQPEDFATYYCQQSFSTPFTFGQGTKVEIK

SEQ ID NO: 2780 - protein, 107 aa, synthetic construct; identical to SEQ ID NO: 2774

SEQ ID NO: 2781 - protein, 123 aa, synthetic construct; identical to SEQ ID NO: 2376

SEQ ID NO: 2782 - protein, 120 aa, synthetic construct; identical to SEQ ID NO: 2377

SEQ ID NO: 2783 - protein, 117 aa, synthetic construct; identical to SEQ ID NO: 2378

SEQ ID NO: 2784 - protein, 119 aa, synthetic construct; identical to SEQ ID NO: 2379

SEQ ID NO: 2785 - protein, 124 aa, synthetic construct; identical to SEQ ID NO: 2380

SEQ ID NO: 2786 - protein, 118 aa, synthetic construct; identical to SEQ ID NO: 2381

SEQ ID NO: 2787 - protein, 120 aa, synthetic construct; identical to SEQ ID NO: 2382

SEQ ID NO: 2788 - protein, 117 aa, synthetic construct; identical to SEQ ID NO: 2383

SEQ ID NO: 2789 - protein, 123 aa, synthetic construct; identical to SEQ ID NO: 2384

SEQ ID NO: 2790 - protein, 123 aa, synthetic construct; identical to SEQ ID NO: 2385

SEQ ID NO: 2791 - protein, 126 aa, synthetic construct; identical to SEQ ID NO: 2386

SEQ ID NO: 2792 - protein, 121 aa, synthetic construct; identical to SEQ ID NO: 2387

SEQ ID NO: 2793 - protein, 125 aa, synthetic construct; identical to SEQ ID NO: 2388

SEQ ID NO: 2794 - protein, 130 aa, synthetic construct; identical to SEQ ID NO: 2389

SEQ ID NO: 2795 - protein, 107 aa, synthetic construct
DIQMTQSPSSLSASVGDRVTITCRASQIIGSYLNWYQQKPGKAPKLLIYTTSNLQSGVPSRFSGSGSGTDFTLTISSLQPEDFATYYCQQSYITPWTFGQGTKVEIK

SEQ ID NO: 2796 - protein, 107 aa, synthetic construct
DIQMTQSPSSLSASVGDRVTITCRASQSISRYINWYQQKPGKAPKLLIYEASSLESGVPSRFSGSGSGTDFTLTISSLQPEDFATYYCQQSHITPLTFGQGTKVEIK

SEQ ID NO: 2797 - protein, 107 aa, synthetic construct
DIQMTQSPSSLSASVGDRVTITCRASQSIYTYLNWYQQKPGKAPKLLIYSASNLHSGVPSRFSGSGSGTDFTLTISSLQPEDFATYYCQQSDTTPWTFGQGTKVEIK

SEQ ID NO: 2798 - protein, 107 aa, synthetic construct
DIQMTQSPSSLSASVGDRVTITCRASQSIATYLNWYQQKPGKAPKLLIYGASSLEGGVPSRFSGSGSGTDFTLTISSLQPEDFATYYCQQTFSSPFTFGQGTKVEIK

SEQ ID NO: 2799 - protein, 107 aa, synthetic construct
DIQMTQSPSSLSASVGDRVTITCRASQNINTYLNWYQQKPGKAPKLLIYSASSLQSGVPSRFSGSGSGTDFTLTISSLQPEDFATYYCQQSSLTPWTFGQGTKVEIK

SEQ ID NO: 2800 - protein, 107 aa, synthetic construct
DIQMTQSPSSLSASVGDRVTITCRASQGIATYLNWYQQKPGKAPKLLIYYASNLQSGVPSRFSGSGSGTDFTLTISSLQPEDFATYYCQQSYSTRFTFGQGTKVEIK

SEQ ID NO: 2801 - protein, 107 aa, synthetic construct
DIQMTQSPSSLSASVGDRVTITCRASERISNYLNWYQQKPGKAPKLLIYTASNLESGVPSRFSGSGSGTDFTLTISSLQPEDFATYYCQQSYTPPRTFGQGTKVEIK

SEQ ID NO: 2802 - protein, 107 aa, synthetic construct
DIQMTQSPSSLSASVGDRVTITCRASQSISSSLNWYQQKPGKAPKLLIYAASRLQDGVPSRFSGSGSGTDFTLTISSLQPEDFATYYCQQSYSTPRSFGQGTKVEIK

SEQ ID NO: 2803 - protein, 107 aa, synthetic construct
DIQMTQSPSSLSASVGDRVTITCRASQSISSHLNWYQQKPGKAPKLLIYRASTLQSGVPSRFSGSGSGTDFTLTISSLQPEDFATYYCQQTYNTPQTFGQGTKVEIK

SEQ ID NO: 2804 - protein, 107 aa, synthetic construct
DIQMTQSPSSLSASVGDRVTITCRASQSISSYLIWYQQKPGKAPKLLIYAASRLHSGVPSRFSGSGSGTDFTLTISSLQPEDFATYYCQQGYNTPRTFGQGTKVEIK

SEQ ID NO: 2805 - protein, 107 aa, synthetic construct
DIQMTQSPSSLSASVGDRVTITCRASPSISTYLNWYQQKPGKAPKLLIYTASRLQTGVPSRFSGSGSGTDFTLTISSLQPEDFATYYCQQTYSTPSSFGQGTKVEIK

SEQ ID NO: 2806 - protein, 107 aa, synthetic construct
DIQMTQSPSSLSASVGDRVTITCRASQNIAKYLNWYQQKPGKAPKLLIYGASGLQSGVPSRFSGSGSGTDFTLTISSLQPEDFATYYCQQSHSPPITFGQGTKVEIK

SEQ ID NO: 2807 - protein, 107 aa, synthetic construct
DIQMTQSPSSLSASVGDRVTITCRASQSIGTYLNWYQQKPGKAPKLLIYAASNLHSGVPSRFSGSGSGTDFTLTISSLQPEDFATYYCQESYSAPYTFGQGTKVEIK

SEQ ID NO: 2808 - protein, 107 aa, synthetic construct
DIQMTQSPSSLSASVGDRVTITCRASQSISPYLNWYQQKPGKAPKLLIYKASSLQSGVPSRFSGSGSGTDFTLTISSLQPEDFATYYCQQSSSTPYTFGQGTKVEIK

SEQ ID NO: 2809 - protein, 116 aa, synthetic construct; identical to SEQ ID NO: 2390

SEQ ID NO: 2810 - protein, 116 aa, synthetic construct; identical to SEQ ID NO: 2391

SEQ ID NO: 2811 - protein, 114 aa, synthetic construct; identical to SEQ ID NO: 2392

SEQ ID NO: 2812 - protein, 116 aa, synthetic construct; identical to SEQ ID NO: 2393

SEQ ID NO: 2813 - protein, 120 aa, synthetic construct; identical to SEQ ID NO: 2394

SEQ ID NO: 2814 - protein, 118 aa, synthetic construct; identical to SEQ ID NO: 2395

SEQ ID NO: 2815 - protein, 116 aa, synthetic construct; identical to SEQ ID NO: 2396

SEQ ID NO: 2816 - protein, 120 aa, synthetic construct; identical to SEQ ID NO: 2397

SEQ ID NO: 2817 - protein, 125 aa, synthetic construct; identical to SEQ ID NO: 2398

SEQ ID NO: 2818 - protein, 121 aa, synthetic construct; identical to SEQ ID NO: 2399

SEQ ID NO: 2819 - protein, 117 aa, synthetic construct; identical to SEQ ID NO: 2400

SEQ ID NO: 2820 - protein, 123 aa, synthetic construct; identical to SEQ ID NO: 2401

SEQ ID NO: 2821 - protein, 120 aa, synthetic construct; identical to SEQ ID NO: 2402

SEQ ID NO: 2822 - protein, 120 aa, synthetic construct; identical to SEQ ID NO: 2403

SEQ ID NO: 2823 - protein, 120 aa, synthetic construct; identical to SEQ ID NO: 2404

SEQ ID NO: 2824 - protein, 120 aa, synthetic construct; identical to SEQ ID NO: 2405

SEQ ID NO: 2825 - protein, 114 aa, synthetic construct; identical to SEQ ID NO: 2406

SEQ ID NO: 2826 - protein, 114 aa, synthetic construct; identical to SEQ ID NO: 2407

SEQ ID NO: 2827 - protein, 114 aa, synthetic construct; identical to SEQ ID NO: 2408

SEQ ID NO: 2828 - protein, 114 aa, synthetic construct; identical to SEQ ID NO: 2409

SEQ ID NO: 2829 - protein, 114 aa, synthetic construct; identical to SEQ ID NO: 2410

SEQ ID NO: 2830 - protein, 128 aa, synthetic construct; identical to SEQ ID NO: 2411

SEQ ID NO: 2831 - protein, 114 aa, synthetic construct; identical to SEQ ID NO: 2412

SEQ ID NO: 2832 - protein, 114 aa, synthetic construct; identical to SEQ ID NO: 2413

SEQ ID NO: 2833 - protein, 120 aa, synthetic construct; identical to SEQ ID NO: 2414

SEQ ID NO: 2834 - protein, 124 aa, synthetic construct; identical to SEQ ID NO: 2415

SEQ ID NO: 2835 - protein, 120 aa, synthetic construct; identical to SEQ ID NO: 2416

SEQ ID NO: 2836 - protein, 120 aa, synthetic construct; identical to SEQ ID NO: 2417

SEQ ID NO: 2837 - protein, 120 aa, synthetic construct; identical to SEQ ID NO: 2418

SEQ ID NO: 2838 - protein, 114 aa, synthetic construct; identical to SEQ ID NO: 2419

SEQ ID NO: 2839 - protein, 114 aa, synthetic construct; identical to SEQ ID NO: 2420

SEQ ID NO: 2840 - protein, 114 aa, synthetic construct; identical to SEQ ID NO: 2421

SEQ ID NO: 2841 - protein, 114 aa, synthetic construct; identical to SEQ ID NO: 2422

SEQ ID NO: 2842 - protein, 114 aa, synthetic construct; identical to SEQ ID NO: 2423

SEQ ID NO: 2843 - protein, 114 aa, synthetic construct; identical to SEQ ID NO: 2424

SEQ ID NO: 2844 - protein, 114 aa, synthetic construct; identical to SEQ ID NO: 2425

SEQ ID NO: 2845 - protein, 114 aa, synthetic construct; identical to SEQ ID NO: 2426

SEQ ID NO: 2846 - protein, 120 aa, synthetic construct; identical to SEQ ID NO: 2427

SEQ ID NO: 2847 - protein, 114 aa, synthetic construct; identical to SEQ ID NO: 2428

SEQ ID NO: 2848 - protein, 114 aa, synthetic construct; identical to SEQ ID NO: 2429

SEQ ID NO: 2849 - protein, 123 aa, synthetic construct; identical to SEQ ID NO: 2430

SEQ ID NO: 2850 - protein, 120 aa, synthetic construct; identical to SEQ ID NO: 2431

SEQ ID NO: 2851 - protein, 114 aa, synthetic construct; identical to SEQ ID NO: 2432

SEQ ID NO: 2852 - protein, 128 aa, synthetic construct; identical to SEQ ID NO: 2433

SEQ ID NO: 2853 - protein, 120 aa, synthetic construct; identical to SEQ ID NO: 2434

SEQ ID NO: 2854 - protein, 114 aa, synthetic construct; identical to SEQ ID NO: 2435

SEQ ID NO: 2855 - protein, 114 aa, synthetic construct; identical to SEQ ID NO: 2436

SEQ ID NO: 2856 - protein, 120 aa, synthetic construct; identical to SEQ ID NO: 2437

SEQ ID NO: 2857 - protein, 114 aa, synthetic construct; identical to SEQ ID NO: 2438

SEQ ID NO: 2858 - protein, 114 aa, synthetic construct; identical to SEQ ID NO: 2439

SEQ ID NO: 2859 - protein, 114 aa, synthetic construct; identical to SEQ ID NO: 2440

SEQ ID NO: 2860 - protein, 114 aa, synthetic construct; identical to SEQ ID NO: 2441

SEQ ID NO: 2861 - protein, 118 aa, synthetic construct; identical to SEQ ID NO: 2442

SEQ ID NO: 2862 - protein, 118 aa, synthetic construct; identical to SEQ ID NO: 2443

SEQ ID NO: 2863 - protein, 114 aa, synthetic construct; identical to SEQ ID NO: 2444

SEQ ID NO: 2864 - protein, 120 aa, synthetic construct; identical to SEQ ID NO: 2445

SEQ ID NO: 2865 - protein, 114 aa, synthetic construct; identical to SEQ ID NO: 2446

SEQ ID NO: 2866 - protein, 114 aa, synthetic construct; identical to SEQ ID NO: 2447

SEQ ID NO: 2867 - protein, 114 aa, synthetic construct; identical to SEQ ID NO: 2448

SEQ ID NO: 2868 - protein, 114 aa, synthetic construct; identical to SEQ ID NO: 2449

SEQ ID NO: 2869 - protein, 114 aa, synthetic construct; identical to SEQ ID NO: 2450

SEQ ID NO: 2870 - protein, 114 aa, synthetic construct; identical to SEQ ID NO: 2451

SEQ ID NO: 2871 - protein, 114 aa, synthetic construct; identical to SEQ ID NO: 2452

SEQ ID NO: 2872 - protein, 120 aa, synthetic construct; identical to SEQ ID NO: 2453

SEQ ID NO: 2873 - protein, 114 aa, synthetic construct; identical to SEQ ID NO: 2454

SEQ ID NO: 2874 - protein, 114 aa, synthetic construct; identical to SEQ ID NO: 2455

SEQ ID NO: 2875 - protein, 120 aa, synthetic construct; identical to SEQ ID NO: 2456

SEQ ID NO: 2876 - protein, 114 aa, synthetic construct; identical to SEQ ID NO: 2457

SEQ ID NO: 2877 - protein, 114 aa, synthetic construct; identical to SEQ ID NO: 2458

SEQ ID NO: 2878 - protein, 114 aa, synthetic construct; identical to SEQ ID NO: 2459

SEQ ID NO: 2879 - protein, 118 aa, synthetic construct; identical to SEQ ID NO: 2460

SEQ ID NO: 2880 - protein, 114 aa, synthetic construct; identical to SEQ ID NO: 2461

SEQ ID NO: 2881 - protein, 114 aa, synthetic construct; identical to SEQ ID NO: 2462

SEQ ID NO: 2882 - protein, 114 aa, synthetic construct; identical to SEQ ID NO: 2463

SEQ ID NO: 2883 - protein, 114 aa, synthetic construct; identical to SEQ ID NO: 2464

SEQ ID NO: 2884 - protein, 120 aa, synthetic construct; identical to SEQ ID NO: 2465

SEQ ID NO: 2885 - protein, 114 aa, synthetic construct; identical to SEQ ID NO: 2466

SEQ ID NO: 2886 - protein, 120 aa, synthetic construct; identical to SEQ ID NO: 2467

SEQ ID NO: 2887 - protein, 114 aa, synthetic construct; identical to SEQ ID NO: 2468

SEQ ID NO: 2888 - protein, 114 aa, synthetic construct; identical to SEQ ID NO: 2469

SEQ ID NO: 2889 - protein, 120 aa, synthetic construct; identical to SEQ ID NO: 2470

SEQ ID NO: 2890 - protein, 120 aa, synthetic construct; identical to SEQ ID NO: 2471

SEQ ID NO: 2891 - protein, 114 aa, synthetic construct; identical to SEQ ID NO: 2472

SEQ ID NO: 2892 - protein, 120 aa, synthetic construct; identical to SEQ ID NO: 2473

SEQ ID NO: 2893 - protein, 114 aa, synthetic construct; identical to SEQ ID NO: 2474

SEQ ID NO: 2894 - protein, 120 aa, synthetic construct; identical to SEQ ID NO: 2475

SEQ ID NO: 2895 - protein, 120 aa, synthetic construct; identical to SEQ ID NO: 2476

SEQ ID NO: 2896 - protein, 123 aa, synthetic construct; identical to SEQ ID NO: 2477

SEQ ID NO: 2897 - protein, 122 aa, synthetic construct; identical to SEQ ID NO: 2478

SEQ ID NO: 2898 - protein, 124 aa, synthetic construct; identical to SEQ ID NO: 2479

SEQ ID NO: 2899 - protein, 116 aa, synthetic construct; identical to SEQ ID NO: 2480

SEQ ID NO: 2900 - protein, 120 aa, synthetic construct; identical to SEQ ID NO: 2481

SEQ ID NO: 2901 - protein, 124 aa, synthetic construct; identical to SEQ ID NO: 2482

SEQ ID NO: 2902 - protein, 114 aa, synthetic construct; identical to SEQ ID NO: 2483

SEQ ID NO: 2903 - protein, 119 aa, synthetic construct; identical to SEQ ID NO: 2484

SEQ ID NO: 2904 - protein, 123 aa, synthetic construct; identical to SEQ ID NO: 2485

SEQ ID NO: 2905 - protein, 122 aa, synthetic construct; identical to SEQ ID NO: 2486

SEQ ID NO: 2906 - protein, 124 aa, synthetic construct; identical to SEQ ID NO: 2487

SEQ ID NO: 2907 - protein, 124 aa, synthetic construct; identical to SEQ ID NO: 2488

SEQ ID NO: 2908 - protein, 126 aa, synthetic construct; identical to SEQ ID NO: 2489

SEQ ID NO: 2909 - protein, 118 aa, synthetic construct; identical to SEQ ID NO: 2490

SEQ ID NO: 2910 - protein, 124 aa, synthetic construct; identical to SEQ ID NO: 2491

SEQ ID NO: 2911 - protein, 126 aa, synthetic construct; identical to SEQ ID NO: 2492

SEQ ID NO: 2912 - protein, 127 aa, synthetic construct; identical to SEQ ID NO: 2493

SEQ ID NO: 2913 - protein, 120 aa, synthetic construct; identical to SEQ ID NO: 2494

SEQ ID NO: 2914 - protein, 120 aa, synthetic construct; identical to SEQ ID NO: 2495

SEQ ID NO: 2915 - protein, 123 aa, synthetic construct; identical to SEQ ID NO: 2496

SEQ ID NO: 2916 - protein, 116 aa, synthetic construct; identical to SEQ ID NO: 2497

SEQ ID NO: 2917 - protein, 115 aa, synthetic construct; identical to SEQ ID NO: 2498

SEQ ID NO: 2918 - protein, 125 aa, synthetic construct; identical to SEQ ID NO: 2499

SEQ ID NO: 2919 - protein, 119 aa, synthetic construct; identical to SEQ ID NO: 2500

SEQ ID NO: 2920 - protein, 119 aa, synthetic construct; identical to SEQ ID NO: 2501

SEQ ID NO: 2921 - protein, 120 aa, synthetic construct; identical to SEQ ID NO: 2502

SEQ ID NO: 2922 - protein, 119 aa, synthetic construct; identical to SEQ ID NO: 2503

SEQ ID NO: 2923 - protein, 123 aa, synthetic construct; identical to SEQ ID NO: 2504

SEQ ID NO: 2924 - protein, 122 aa, synthetic construct; identical to SEQ ID NO: 2505

SEQ ID NO: 2925 - protein, 118 aa, synthetic construct; identical to SEQ ID NO: 2506

SEQ ID NO: 2926 - protein, 120 aa, synthetic construct; identical to SEQ ID NO: 2507

SEQ ID NO: 2927 - protein, 122 aa, synthetic construct; identical to SEQ ID NO: 2508

SEQ ID NO: 2928 - protein, 119 aa, synthetic construct; identical to SEQ ID NO: 2509

SEQ ID NO: 2929 - protein, 123 aa, synthetic construct; identical to SEQ ID NO: 2510

SEQ ID NO: 2930 - protein, 118 aa, synthetic construct; identical to SEQ ID NO: 2511

SEQ ID NO: 2931 - protein, 118 aa, synthetic construct; identical to SEQ ID NO: 2513

SEQ ID NO: 2932 - protein, 118 aa, synthetic construct; identical to SEQ ID NO: 2514

SEQ ID NO: 2933 - protein, 123 aa, synthetic construct; identical to SEQ ID NO: 2515

SEQ ID NO: 2934 - protein, 123 aa, synthetic construct; identical to SEQ ID NO: 2516

SEQ ID NO: 2935 - protein, 119 aa, synthetic construct; identical to SEQ ID NO: 2517

SEQ ID NO: 2936 - protein, 121 aa, synthetic construct; identical to SEQ ID NO: 2518

SEQ ID NO: 2937 - protein, 116 aa, synthetic construct; identical to SEQ ID NO: 2519

SEQ ID NO: 2938 - protein, 123 aa, synthetic construct; identical to SEQ ID NO: 2520

SEQ ID NO: 2939 - protein, 120 aa, synthetic construct; identical to SEQ ID NO: 2521

SEQ ID NO: 2940 - protein, 128 aa, synthetic construct; identical to SEQ ID NO: 2522

SEQ ID NO: 2941 - protein, 116 aa, synthetic construct; identical to SEQ ID NO: 2523

SEQ ID NO: 2942 - protein, 122 aa, synthetic construct; identical to SEQ ID NO: 2524

SEQ ID NO: 2943 - protein, 114 aa, synthetic construct; identical to SEQ ID NO: 2525

SEQ ID NO: 2944 - protein, 125 aa, synthetic construct; identical to SEQ ID NO: 2526

SEQ ID NO: 2945 - protein, 120 aa, synthetic construct; identical to SEQ ID NO: 2527

SEQ ID NO: 2946 - protein, 119 aa, synthetic construct; identical to SEQ ID NO: 2528

SEQ ID NO: 2947 - protein, 125 aa, synthetic construct; identical to SEQ ID NO: 2529

SEQ ID NO: 2948 - protein, 119 aa, synthetic construct; identical to SEQ ID NO: 2530

SEQ ID NO: 2949 - protein, 121 aa, synthetic construct
EVQLVESGGGLVQPGGSLRLSCAASGFTLGDYVMGWFRQAPGKEREFVAAIHSGGSTYADSVKGRFTISADNSKNTAYLQMNSLKPEDTAVYYCAAKEYGGTRRYDRAYNWGQGTLVTVSS

SEQ ID NO: 2950 - protein, 115 aa, synthetic construct
EVQLVESGGGLVQPGGSLRLSCAASGGGTFGSYAMGWFRQAPGKERELVAAISSGGSTNYADSVKGRFTISADNSKNTAYLQMNSLKPEDTAVYYCARGDWRYGWGQGTLVTVSS

SEQ ID NO: 2951 - protein, 124 aa, synthetic construct
EVQLVESGGGLVQPGGSLRLSCAASGRTYSISAMGWFRQAPGKEREFVAAISMSGDDSAYADSVKGRFTISADNSKNTAYLQMNSLKPEDTAVYYCAAQLGYESGYSLTYDYDWGQGTLVTVSS

SEQ ID NO: 2952 - protein, 123 aa, synthetic construct
EVQLVESGGGLVQPGGSLRLSCAASGGTFSTYPMGWFRQAPGKEREFVAAITSDGSTLYADSVKGRFTISADNSKNTAYLQMNSLKPEDTAVYYCAATDYNKAYAREGRRYDWGQGTLVTVSS

SEQ ID NO: 2953 - protein, 123 aa, synthetic construct
EVQLVESGGGLVQPGGSLRLSCAASGSIFRINAMGWFRQAPGKEREFVAAIHWSGSSTRYADSVKGRFTISADNSKNTAYLQMNSLKPEDTAVYYCAAQDRRRGDYYTFDYHWGQGTLVTVSS

SEQ ID NO: 2954 - protein, 114 aa, synthetic construct
EVQLVESGGGLVQPGGSLRLSCAASGGTFNNYAMGWFRQAPGKERELVAAITSGGSTDYADSVKGRFTISADNSKNTAYLQMNSLKPEDTAVYYCARGDWRYGWGQGTLVTVSS

SEQ ID NO: 2955 - protein, 116 aa, synthetic construct
EVQLVESGGGLVQPGGSLRLSCAASGTIVNINVMGWFRQAPGKEREFVAAIHWSGGLKAYADSVKGRFTISADNSKNTAYLQMNSLKPEDTAVYYCAMNRAGIYEWGQGTLVTVSS

SEQ ID NO: 2956 - protein, 114 aa, synthetic construct
EVQLVESGGGLVQPGGSLRLSCAASGSTFSNYAMGWFRQAPGKERELVAAITSGGSTSYADSVKGRFTISADNSKNTAYLQMNSLKPEDTAVYYCARGDWRYGWGQGTLVTVSS

SEQ ID NO: 2957 - protein, 123 aa, synthetic construct
EVQLVESGGGLVQPGGSLRLSCAASGFSFDDYVMGWFRQAPGKEREFVAAISRSGNLKSYADSVKGRFTISADNSKNTAYLQMNSLKPEDTAVYYCAAKEYGGTRRYDRAYNWGQGTLVTVSS

SEQ ID NO: 2958 - protein, 115 aa, synthetic construct
EVQLVESGGGLVQPGGSLRLSCAASGSAFRSTVMGWFRQAPGKEREFVAAVIGSSGITDYADSVKGRFTISADNSKNTAYLQMNSLKPEDTAVYYCARGDWRYGWGQGTLVTVSS

SEQ ID NO: 2959 - protein, 116 aa, synthetic construct
EVQLVESGGGLVQPGGSLRLSCAASGRTFSDAGMGWFRQAPGKEREFVAAISRSGNLKAYADSVKGRFTISADNSKNTAYLQMNSLKPEDTAVYYCAVQVNGTWAWGQGTLVTVSS

SEQ ID NO: 2960 - protein, 115 aa, synthetic construct
EVQLVESGGGLVQPGGSLRLSCAASGFTLDYYAMGWFRQAPGKERELVAAISWNGGSTSYADSVKGRFTISADNSKNTAYLQMNSLKPEDTAVYYCARGDWRYGWGQGTLVTVSS

SEQ ID NO: 2961 - protein, 120 aa, synthetic construct
EVQLVESGGGLVQPGGSLRLSCAASGGTFSTYVMGWFRQAPGKEREFVAAISWSGESTLYADSVKGRFTISADNSKNTAYLQMNSLKPEDTAVYYCAADLMYGVDRRYDWGQGTLVTVSS

SEQ ID NO: 2962 - protein, 114 aa, synthetic construct
EVQLVESGGGLVQPGGSLRLSCAASGISSSKRNMGWFRQAPGKEREFVAGISWTGGITYYADSVKGRFTISADNSKNTAYLQMNSLKPEDTAVYYCAIAGRGRWGQGTLVTVSS

SEQ ID NO: 2963 - protein, 122 aa, synthetic construct
EVQLVESGGGLVQPGGSLRLSCAASGRRFSAYGMGWFRQAPGKEREFVAVISRSGTLTRYADSVKGRFTISADNSKNTAYLQMNSLKPEDTAVYYCASSGPADARNGERWHWGQGTLVTVSS

SEQ ID NO: 2964 - protein, 123 aa, synthetic construct
EVQLVESGGGLVQPGGSLRLSCAASGLTFSSFVMGWFRQAPGKEREFVAAISSNGGSTRYADSVKGRFTISADNSKNTAYLQMNSLKPEDTAVYYCAAKEYGGTRRYDRAYNWGQGTLVTVSS

SEQ ID NO: 2965 - protein, 124 aa, synthetic construct
EVQLVESGGGLVQPGGSLRLSCAASGTVFSISAMGWFRQAPGKEREFVAAISMSGDDTAYADSVKGRFTISADNSKNTAYLQMNSLKPEDTAVYYCAAQLGYESGYSLTYDYDWGQGTLVTVSS

SEQ ID NO: 2966 - protein, 117 aa, synthetic construct
EVQLVESGGGLVQPGGSLRLSCAASGSIFSPNVMGWFRQAPGKEREFVAAITNGGSTKYADSVKGRFTISADNSKNTAYLQMNSLKPEDTAVYYCAAQRWRGGSYEWGQGTLVTVSS

SEQ ID NO: 2967 - protein, 123 aa, synthetic construct
EVQLVESGGGLVQPGGSLRLSCAASGIPASIRVMGWFRQAPGKEREFVAAIHWSGSSTRYADSVKGRFTISADNSKNTAYLQMNSLKPEDTAVYYCALSRAIVPGDSEYDYRWGQGTLVTVSS

SEQ ID NO: 2968 - protein, 124 aa, synthetic construct
EVQLVESGGGLVQPGGSLRLSCAASGRTFSMSAMGWFRQAPGKEREFVSAISWSGGSTLYADSVKGRFTISADNSKNTAYLQMNSLKPEDTAVYYCAAQLGYESGYSLTYDYDWGQGTLVTVSS

SEQ ID NO: 2969 - protein, 114 aa, synthetic construct
EVQLVESGGGLVQPGGSLRLSCAASGRTFSNYAMGWFRQAPGKERELVAAITSGGSTDYADSVKGRFTISADNSKNTAYLQMNSLKPEDTAVYYCARGDWRYGWGQGTLVTVSS

SEQ ID NO: 2970 - protein, 114 aa, synthetic construct
EVQLVESGGGLVQPGGSLRLSCAASGRTFSSYAMGWFRQAPGKERELVAAISTGGSTYYADSVKGRFTISADNSKNTAYLQMNSLKPEDTAVYYCARGDWRYGWGQGTLVTVSS

SEQ ID NO: 2971 - protein, 122 aa, synthetic construct
EVQLVESGGGLVQPGGSLRLSCAASGRSFSSVGMGWFRQAPGKEREFVAVISRSGASTAYADSVKGRFTISADNSKNTAYLQMNSLKPEDTAVYYCASAGPADARNGERWAWGQGTLVTVSS

SEQ ID NO: 2972 - protein, 117 aa, synthetic construct
EVQLVESGGGLVQPGGSLRLSCAASGRAFRRYTMGWFRQAPGKERELIAVINWSGDRRYYADSVKGRFTISADNSKNTAYLQMNSLKPEDTAVYYCAATLAKGGGRWGQGTLVTVSS

SEQ ID NO: 2973 - protein, 121 aa, synthetic construct
EVQLVESGGGLVQPGGSLRLSCAAMAWAGFARRRAKNAKWWRALPRGGPTYADSVKGRFTISADNSKNTAYLQMNSLKPEDTAVYYCAAGGMWYGSSLYVRFDLLEDGMDWGQGTLVTVSS

SEQ ID NO: 2974 - protein, 122 aa, synthetic construct
EVQLVESGGGLVQPGGSLRLSCAASGSISSINGMGWFRQAPGKERELVALISRSGGTTYYADSVKGRFTISADNSKNTAYLQMNSLKPEDTAVYYCASAGPADARNGERWAWGQGTLVTVSS

SEQ ID NO: 2975 - protein, 114 aa, synthetic construct
EVQLVESGGGLVQPGGSLRLSCAASGRTFSNNVMGWFRQAPGKERELVAAAISGGSTYYADSVKGRFTISADNSKNTAYLQMNSLKPEDTAVYYCARGDWRYGWGQGTLVTVSS

SEQ ID NO: 2976 - protein, 123 aa, synthetic construct
EVQLVESGGGLVQPGGSLRLSCAASGRTFSISAMGWFRQAPGKEREFVAAISRSGTTMYADSVKGRFTISADNSKNTAYLQMNSLKPEDTAVYYCAAQLGYESGYSLTYDYDWGQGTLVTVSS

SEQ ID NO: 2977 - protein, 125 aa, synthetic construct
EVQLVESGGGLVQPGGSLRLSCAASGGTFSYYDLAAMGWFRQAPGKEREFVAAISWSQYNTKYADSVKGRFTISADNSKNTAYLQMNSLKPEDTAVYYCAARVVVRTAHGFEDNWGQGTLVTVSS

SEQ ID NO: 2978 - protein, 119 aa, synthetic construct
EVQLVESGGGLVQPGGSLRLSCAASGRTFNNYGMGWFRQAPGKEREFVAVISRSGSLKAYADSVKGRFTISADNSKNTAYLQMNSLKPEDTAVYYCASDPTYGSGRWTWGQGTLVTVSS

SEQ ID NO: 2979 - protein, 123 aa, synthetic construct
EVQLVESGGGLVQPGGSLRLNCAASGFTLDDYVMGWFRQTPGKEREFVAAISSSGALTSYADSVKGRFTISADNSKNTAYLQMNSLKPEDAAVYYCAAKEYGGTRRYDRAYNWGQGTLVTVSS

SEQ ID NO: 2980 - protein, 121 aa, synthetic construct
EVQLVESGGGLVQPGGSLRLSCAASGRTFNAMGWFRQAPGKEREFVAAIRWSGDMSVYADSVKGRFTISADNSKNTAYLQMNSLKPEDTAVYYCAAQDRRRGDYYTFDYHWGQGTLVTVSS

SEQ ID NO: 2981 - protein, 114 aa, synthetic construct
EVQLVESGGGLVQPGGSLRLSCAASGLTFSTYAMGWFRQAPGKEREFVAAITSGGSTDYADSVKGRFTISADNSKNTAYLQMNSLKPEDTAVYYCARGDWRYGWGQGTLVTVSS

SEQ ID NO: 2982 - protein, 114 aa, synthetic construct
EVQLVESGGGLVQPGGSLRLSCAASGSIFTINAMGWFRQAPGKEREGVAAIGSDGSTSYADSVKGRFTISADNSKNTAYLQMNSLKPEDTAVYYCAVVRWGADWGQGTLVTVSS

SEQ ID NO: 2983 - protein, 116 aa, synthetic construct
EVQLVESGGGLVQPGGSLRLSCAASGLTFSSYAMGWFRQAPGKERELVAAITSSSGSTPAYADSVKGRFTISADNSKNTAYLQMNSLKPEDTAVYYCARGDWRYGWGQGTLVTVSS

SEQ ID NO: 2984 - protein, 123 aa, synthetic construct
EVQLVESGGGLVQPGGSLRLSCAASGIPFSTRTMGWFRQAPGKEREFVAAISWSQYNTKYADSVKGRFTISADNSKNTAYLQMNSLKPEDTAVYYCAARHWGMFSRSENDYNWGQGTLVTVSS

SEQ ID NO: 2985 - protein, 125 aa, synthetic construct
EVQLVESGGGLVQPGGSLRLSCAASGRSRFSTYVMGWFRQAPGKEREFVAAISWSQYNTKYADSVKGRFTISADNSKNTAYLQMNSLKPEDTAVYYCAAGNGGRNYGHSRARYDWGQGTLVTVSS

SEQ ID NO: 2986 - protein, 118 aa, synthetic construct
EVQLVESGGGLVQPGGSLRLSCAASGLTLSSYGMGWFRQAPGKEREYVAVISRSGSLKAYADSVKGRFTISADNSKNTAYLQMNSLKPEDTAVYYCATRADAEGWWDWGQGTLVTVSS

SEQ ID NO: 2987 - protein, 113 aa, synthetic construct
EVQLVESGGGLVQPGGSLRLSCAASGSIFRVNVMGWFRQAPGKEREFVAAINNFGTTKYADSVKGRFTISADNSKNTAYLQMNSLKPEDTAVYYCAADLPSRWGQGTLVTVSS

SEQ ID NO: 2988 - protein, 114 aa, synthetic construct
EVQLVESGGGLVQPGGSLRLSCAASGRTFRNYAMGWFRQAPGKERELVAAISSGGSTDYADSVKGRFTISADNSKNTAYLQMNSLKPEDTAVYYCARGDWRYGWGQGTLVTVSS

SEQ ID NO: 2989 - protein, 114 aa, synthetic construct
EVQLVESGGGLVQPGGSLRLSCAASGRTFSSFAMGWFRQAPGKERELVAAISSGGSTNYADSVKGRFTISADNSKNTAYLQMNSLKPEDTAVYYCARGDWRYGWGQGTLVTVSS

SEQ ID NO: 2990 - protein, 123 aa, synthetic construct
EVQLVESGGGLVQPGGSLRLSCAASGTTFRINAMGWFRQAPGKEREFVAAMNWSGGSTKYADSVKGRFTISADNSKNTAYLQMNSLKPEDTAVYYCAAQDRRRGDYYTFDYHWGQGTLVTVSS

SEQ ID NO: 2991 - protein, 122 aa, synthetic construct
EVQLVESGGGLVQPGGSLRLSCAASGFTLGDYVMGWFRQAPGKEREFVAAIHSGGSTLYADSVKGRFTISADNSKNTAYLQMNSLKPEDTAVYYCAAKEYGGTRRYDRTYNWGQGTLVTVSS

SEQ ID NO: 2992 - protein, 112 aa, synthetic construct
EVQLVESGGGLVQPGGSLRLSCAASGFTFSRSAMGWFRQAPGKERELVAGILSSGATVYADSVKGRFTISADNSKNTAYLQMNSLKPEDTAVYYCAKAPRDWGQGTLVTVSS

SEQ ID NO: 2993 - protein, 114 aa, synthetic construct
EVQLVESGGGLVQPGGSLRLSCAASGRTFNNYAMGWFRQAPGKERELVAAITSGGSTDYADSVKGRFTISADNSKNTAYLQMNSLKPEDTAVYYCARGDWRYGWGQGTLVTVSS

SEQ ID NO: 2994 - protein, 116 aa, synthetic construct
EVQLVESGGGLVQPGGSLRLSCAASGFTFRSYPMGWFRQAPGKEREFVAAINNFGTTKYADSVKGRFTISADNSKNTAYLQMNSLKPEDTAVYYCAAAKGIGVYGWGQGTLVTVSS

SEQ ID NO: 2995 - protein, 121 aa, synthetic construct
EVQLVESGGGLVQPGGSLRLSCAASGNIFTRNVMGWFRQAPGKEREFVAAIHWNGDSTKYADSVKGRFTISADNSKNTAYLQMNSLKPEDTAVYYCAAGSNIGGSRWRYDWGQGTLVTVSS

SEQ ID NO: 2996 - protein, 123 aa, synthetic construct
EVQLVESGGGLVQPGGSLRLSCAASGRTISRYTMGWFRQAPGKERELVAAIKWSGASTVYADSVKGRFTISADNSKNTAYLQMNSLKPEDTAVYYCAAKGIWDYLGRRDFGDWGQGTLVTVSS

SEQ ID NO: 2997 - protein, 124 aa, synthetic construct
EVQLVESGGGLVQPGGSLRLSCAASGFRFSSYGMGWFRQAPGKEREFVAIITSGGLTVYADSVKGRFTISADNSKNTAYLQMNSLKPEDTAVYYCAARKTFYFGTSSYPNDYAWGQGTLVTVSS

SEQ ID NO: 2998 - protein, 114 aa, synthetic construct
EVQLVESGGGLVQPGGSLRLSCAASGRTFDNHAMGWFRQAPGKEREGVAAIGSDGSTSYADSVKGRFTISADNSKNTAYLQMNSLKPEDTAVYYCAVVRWGVDWGQGTLVTVSS

SEQ ID NO: 2999 - protein, 115 aa, synthetic construct
EVQLVESGGGLVQPGGSLRLSCAASGFTFSSHAMGWFRQAPGKEREFVAGISWSGESTLTRYADSVKGRFTISADNSKNTAYLQMNSLKPEDTAVYYCADVNGDWGQGTLVTVSS

SEQ ID NO: 3000 - protein, 124 aa, synthetic construct
EVQLVESGGGLVQPGGSLRLSCAASGMTFRLYAMGWFRQAPGKEREFVAAISWSQYNTKYADSVKGRFTISADNSKNTAYLQMNSLKPEDTAVYYCAAQLGYESGYSLTYDYDWGQGTLVTVSS

SEQ ID NO: 3001 - protein, 115 aa, synthetic construct
EVQLVESGGGLVQPGGSLRLSCAASGGTFRKLAMGWFRQAPGKEREFVAVISWTGGSSYYADSVKGRFTISADNSKNTAYLQMNSLKPEDTAVYYCARLTSFATWGQGTLVTVSS

SEQ ID NO: 3002 - protein, 118 aa, synthetic construct
EVQLVESGGGLVQPGGSLRLSCAASGRTFSANGMGWFRQAPGKEREFVAAISASGTLRAYADSVKGRFTISADNSKNTAYLQMNSLKPEDTAVYYCAARSPMSPTWDWGQGTLVTVSS

SEQ ID NO: 3003 - protein, 121 aa, synthetic construct
EVQLVESGGGLVQPGGSLRLSCAASGSAFRSTVMGWFRQAPGKEREFVAAISWTGESTLYADSVKGRFTISADNSKNTAYLQMNSLKPEDTAVYYCATGPYRSYFARSYLWGQGTLVTVSS

SEQ ID NO: 3004 - protein, 117 aa, synthetic construct
EVQLVESGGGLVQPGGSLRLSCAASGGTFDYSGMGWFRQAPGKEREFVAVVSQSGRTTYYADSVKGLFTITADNSKNTAYLQMNLLKPEDTAVYYCPTATRPGEWDGGQGTLVTVSR

SEQ ID NO: 3005 - protein, 111 aa, synthetic construct
EVQLVESGGGLVQPGGSLRLSCAASGVFGPIRAMGWFRQAPGKERELVALMGNDGSTYADSVKGRFTISADNSKNTAYLQMNSLKPEDTAVYYCAAIGWRWGQGTLVTVSS

SEQ ID NO: 3006 - protein, 121 aa, synthetic construct
EVQLVESGGGLVQPGGSLRLSCAASGFNFNWYPMGWFRQAPGKEREFVAAIRWSGGITYYADSVKGRFTISADNSKNTAYLQMNSLKPEDTAVYYCATGPYRSYFARSYLWGQGTLVTVSS

SEQ ID NO: 3007 - protein, 112 aa, synthetic construct
EVQLVESGGGLVQPGGSLRLSCAASGMTFHRYVMGWFRQAPGKERELVASITTGGTPNYADSVKGRFTIITDNNKNTAYLLMINLQPEDTAVYYCCKVPYIWGQGTLGTVGT

SEQ ID NO: 3008 - protein, 113 aa, synthetic construct
EVQLVESGGGLVQPGGSLRLSCAASGISTMGWFRQAPGKEREFVAAINNFGTTKYADSVKGRFTISADNSKNTAYLQMNSLKPEDTAVYYCAAASQSGSGYDWGQGTLVTVSS

SEQ ID NO: 3009 - protein, 111 aa, synthetic construct
EVQLVESGGGLVQPGGSLRLSCAASGRAFNTRAMGWFRQAPGKERELVALMGNDGSTYADSVKGRFTISADNSKNTAYLQMNSLKPEDTAVYYCAAIGWRWGQGTLVTVSS

SEQ ID NO: 3010 - protein, 123 aa, synthetic construct
EVQLVESGGGLVQPGGSLRLSCAASGLTDRRYTMGWFRQAPGKEREFVAAINSGGSTLYADSVKGRFTISADNSKNTAYLQMNSLKPEDTAVYYCAAGNGGRTYGHSRARYEWGQGTLVTVSS

SEQ ID NO: 3011 - protein, 111 aa, synthetic construct
EVQLVESGGGLVQPGGSLRLSCAASGRTFNVMGWFRQAPGKERELVALMGNDGSTYADSVKGRFTISADNSKNTAYLQMNSLKPEDTAVYYCAAVRWGVDWGQGTLVTVSS

SEQ ID NO: 3012 - protein, 112 aa, synthetic construct
EVQLVESGGGLVQPGGSLRLSCAASGRAFNTRAMGWFRQAPGKERELVALMGNDGSTNYADSVKGRFTISADNSKNTAYLQMNSLKPEDTAVYYCAAIGWRWGQGTLVTVSS

SEQ ID NO: 3013 - protein, 117 aa, synthetic construct
EVQVVESGGGVVHPGGSVRMRCAASGVTVDYSGMGWFGQAPGKEREFVAVVSQSARTTYYADSVKGRFTISADNSKNTEYLQMNSMKPEDTAVYYCATATRPGEWDWGQGTLVTVSS

SEQ ID NO: 3014 - protein, 124 aa, synthetic construct
EVQLVESGGGLVQPGGSLRLSCAASGRTPRLGAMGWFRQAPGKEREFVAAISRSGGLTSYADSVKGRFTISADNSKNTAYLQMNSLKPEDTAVYYCAAQLVGSNIGGSRWRYDWGQGTLVTVSS

SEQ ID NO: 3015 - protein, 114 aa, synthetic construct
EVQLVESGGGLVQPGGSLRLSCAASGLTFRNYAMGWFRQAPGKEREFVAAITSGGSTLYADSVKGRFTISADNSKNTAYLQMNSLKPEDTAVYYCARGDWRYGWGHGTLVTESS

SEQ ID NO: 3016 - protein, 114 aa, synthetic construct
EVQLVESGGGLVQPGGSLRLSCAASGGRTFSDLAMGWFRQAPGKEREFVALITRSGGTTFYADSVKGRFTISADNSKNTAYLQMNSLKPEDTAVYYCAIGRGSWGQGTLVTVSS

SEQ ID NO: 3017 - protein, 117 aa, synthetic construct
EVQLVESGGGLVQPGGSLRLSCAASGFTFGEYAMGWFRQAPGKEREFVAAVSSLGPFTRYADSVKGRFTISADNSKNTAYLQMNSLKPEDTAVYYCAAVLDGYSGSWGQGTLVTVSS

SEQ ID NO: 3018 - protein, 124 aa, synthetic construct
EVQLVESGGGLVQPGGSLRLSCAASGFAFSSYGMGWFRQAPGKEREFVAAISWSGVRSGVSAIYADSVKGRFTISADNSKNTAYLQMNSLKPEDTAVYYCTTDLTGDLWYFDLWGQGTLVTVSS

SEQ ID NO: 3019 - protein, 119 aa, synthetic construct
EVQLVESGGGLVQPGGSLRLSCAASGLTAGTYAMCWFRQAPGKEREGVACASSTDGSTAYADSVKGRFTISADNSKNTAYLQMNSLKPEDTAVYYCAAVRTYGSATYDWGQGTLVTVSS

SEQ ID NO: 3020 - protein, 123 aa, synthetic construct
EVQLVESGGGLVQPGGSLRLSCAASGFTLDDYVMGWFRQAPGKERELVAAVSSLGPFTRYADSVKGRFTISADNSKNTAYLQMNSLKPEDTAVYYCAAKEYGGTRRYDRAYNWGQGTLVTVSS

SEQ ID NO: 3021 - protein, 118 aa, synthetic construct
EVQLVESGGGLVQPGGSLRLSCAASGPTLGSYVMGWFRQAPGKEREFVAAISWSQYNTKYADSVKGRFTISADNSKNTAYLQMNSLKPEDTAVYYCAAQRWRGGSYEWGQGTLVTVSS

SEQ ID NO: 3022 - protein, 118 aa, synthetic construct
EVQLVESGGGLVQPGGSLRLSCAASGPTFSSYVMGWFRQAPGKEREFVAAISWSQYNTKYADSVKGRFTISADNSKNTAYLQMNSLKPEDTAVYYCAAASRSGSGYDWGQGTLVTVSS

SEQ ID NO: 3023 - protein, 120 aa, synthetic construct
EVQLVESGGGLVQPGGSLRLSCAASGYLYSKDCMGWFRQAPGKEREGVATICTGDGSTAYADSVKGRFTISADNSKNTAYLQMNSLKPEDTAVYYCAVIAYEEGVYRWDWGQGTLVTVSS

SEQ ID NO: 3024 - protein, 117 aa, synthetic construct
EVQLVESGGGLVQPGGSLRLSCAASGFTIDDYAMGWFRQAPGKEREGVAAISGSGDDTYYADSVKGRFTISADNSKNTAYLQMNSLKPEDTAVYYCAKLPYVSGDYWGQGTLVTVSS

SEQ ID NO: 3025 - protein, 116 aa, synthetic construct
EVQLVESGGGLVQPGGSLRLSCAASGGRFSDYGMGWFRQAPGKERELVALISRSGNLKSYADSVKGRFTISADNSKNTAYLQMNSLKPEDTAVYYCAAKTGTSFVWGQGTLVTVSS

SEQ ID NO: 3026 - protein, 114 aa, synthetic construct
EVQLVESGGGLVQPGGSLRLSCAASGLSFSNYAMGWFRQAPGKERELVAAITSGGSTDYADSVKGRFTISADNSKNTAYLQMNSLKPEDTAVYYCARGDWRYGWGQGTLVTVSS

SEQ ID NO: 3027 - protein, 113 aa, synthetic construct
EVQLVESGGGLVQPGGSLRLSCAASGIPSTLRAMGWFRQAPGKEREFVALINRSGGSQFYADSVKGRFTISADNSKNTAYLQMNSLKPEDTAVYYCAIGRGSWGQGTLVTVSS

SEQ ID NO: 3028 - protein, 123 aa, synthetic construct
EVQLVESGGGLVQPGGSLRLSCAASGRTFSRLAMGWFRQAPGKEREFVAAISRSGRSTSYADSVKGRFTISADNSKNTAYLQMNSLKPEDTAVYYCAARRSQILFTSRTDYEWGQGTLVTVSS

SEQ ID NO: 3029 - protein, 126 aa, synthetic construct
EVQLVESGGGLVQPGGSLRLSCAASGSFSIAAMGWFRQAPGKEREFVATINYSGGGTYYADSVKGRFTISADNSKNTAYLQMNSLKPEDTAVYYCAAVNTFDESAYAAFACYDVVWGQGTLVTVSS

SEQ ID NO: 3030 - protein, 123 aa, synthetic construct
EVQLVESGGGLVQPGGSLRLSCAASGRTFSRYAMGWFRQAPGKEREFVAAISRSGKSTYYADSVKGRFTISADNSKNTAYLQMNSLKPEDTAVYYCAASSVFSDLRYRKNPKWGQGTLVTVSS

SEQ ID NO: 3031 - protein, 144 aa, synthetic construct
EVQLVESGGGLVQPGGSLRLSCAASGRTFSKYAMGWFRQAPGKEREFVSHISRDGGRTFSSSTMGWFRQAPGKERELVALITPSSRTTYYADSVKGRFTISADNSKNTAYLQMNSLKPEDTAVYYCAIAGRGRWGQGTLVTVSS

SEQ ID NO: 3032 - protein, 123 aa, synthetic construct
EVQLVESGGGLVQPGGSLRLSCAASGRTFRRYAMGWFRQAPGKEREFVASINWGGGNTYYADSVKGRFTISADNSKNTAYLQMNSLKPEDTAVYYCAKTKRTGIFTTARMVDWGQGTLVTVSS

SEQ ID NO: 3033 - protein, 129 aa, synthetic construct
EVQLVESGGGLVQPGGSLRLSCAASGRTFSRFAMGWFRQAPGKEREFVAAIRWSGGRTVYADSVKGRFTISADNSKNTAYLQMNSLKPEDTAVYYCAIEPGTIRNWRNRVPFARGNFGWGQGTLVTVSS

SEQ ID NO: 3034 - protein, 121 aa, synthetic construct
EVQLVESGGGLVQPGGSLRLSCAASGLGIAFSRRTAMGWFRQAPGKEREFVAAISWRGGNTYYADSVKGRFTISADNSKNTAYLQMNSLKPEDTAVYYCAARRWIPPGPIWGQGTLVTVSS

SEQ ID NO: 3035 - protein, 122 aa, synthetic construct
EVQLVESGGGLVQPGGSLRLSCAASGRTFRRYPMGWFRQAPGKEREFVAAISRSGGSTYYADSVKGRFTISADNSKNTAYLQMNSLKPEDTAVYYCAAKRLRSFASGGSYDWGQGTLVTVSS

SEQ ID NO: 3036 - protein, 123 aa, synthetic construct
EVQLVESGGGLVQPGGSLRLSCAASGGTLRGYGMGWFRQAPGKEREFVASISRSGGSTYYADSVKGRFTISADNSKNTAYLQMNSLKPEDTAVYYCAARRRVTLFTSRADYDWGQGTLVTVSS

SEQ ID NO: 3037 - protein, 118 aa, synthetic construct
EVQLVESGGGLVQPGGSLRLSCAASGRMFSSRSMGWFRQAPGKEREFVALINRSGGSQFYADSVKGRFTISADNSKNTAYLQMNSLKPEDTAVYYCAARRWIPPGPIWGQGTLVTVSS

SEQ ID NO: 3038 - protein, 122 aa, synthetic construct
EVQLVESGGGLVQPGGSLRLSCAASGRTFGRRAMGWFRQAPGKEREFVAGISRGGGTNYADSVKGRFTISADNSKNTAYLQMNSLKPEDTAVYYCAAKGIWDYLGRRDFGDWGQGTLVTVSS

SEQ ID NO: 3039 - protein, 131 aa, synthetic construct
EVQLVESGGGLVQPGGSLRLSCAASGLSSPPFDDFPMGWFRQAPGKEREFVSSIYSDDGDSMYADSVKGRFTISADNSKNTAYLQMNSLKPEDTAVYYCARQTFDFWSASLGGNFWYFDLWGQGTLVTVSS

SEQ ID NO: 3040 - protein, 117 aa, synthetic construct
EVQLVESGGGLVQPGGSLRLSCAASGGTFSSYSMGWFRQAPGKEREFVSAISWIIGSGGTTNYADSVKGRFTISADNSKNTAYLQMNSLKPEDTAVYYCTAGAGDSWGQGTLVTVSS

SEQ ID NO: 3041 - protein, 120 aa, synthetic construct
EVQLVESGGGLVQPGGSLRLSCAASGSIFSTRTMGWFRQAPGKEREFVASITKFGSTNYADSVKGRFTISADNSKNTAYLQMNSLKPEDTAVYYCTRGGGRFFDWLYLRWGQGTLVTVSS

SEQ ID NO: 3042 - protein, 125 aa, synthetic construct
EVQLVESGGGLVQPGGSLRLSCAASGRTLWRSNMGWFRQAPGKEREFVASISSFGSTKYADSVKGRFTISADNSKNTAYLQMNSLKPEDTAVYYCARGHGRYFDWLLFARPPDYWGQGTLVTVSS

SEQ ID NO: 3043 - protein, 120 aa, synthetic construct
EVQLVESGGGLVQPGGSLRLSCAASGRSLGIYRMGWFRQAPGKEREFVAAITSGGRKNYADSVKGRFTISADNSKNTAYLQMNSLKPEDTAVYYCAKRTIFGVGRWLDPWGQGTLVTVSS

SEQ ID NO: 3044 - protein, 124 aa, synthetic construct
EVQLVESGGGLVQPGGSLRLSCAASGTTLTFRIMGWFRQAPGKEREFVPAISSTGLASYTDSVKGRFTISADNSKNTAYLQMNSLKPEDTAVYYCSKDRAPNCFACCPNGFDVWGQGTLVTVSS

SEQ ID NO: 3045 - protein, 121 aa, synthetic construct
EVQLVESGGGLVQPGGSLRLSCAASGSRFSGRFNILNMGWFRQAPGKEREFVARIGYSGQSISYADSVKGRFTISADNSKNTAYLQMNSLKPEDTAVYYCARGRFLGGTEWGQGTLVTVSS

SEQ ID NO: 3046 - protein, 122 aa, synthetic construct
EVQLVESGGGLVQPGGSLRLSCAASGTLFKINAMGWFRQAPGKEREFVAQINRHGVTYYADSVKGRFTISADNSKNTAYLQMNSLKPEDTAVYYCARGRTIFFGGGRYFDYWGQGTLVTVSS

SEQ ID NO: 3047 - protein, 130 aa, synthetic construct
EVQLVESGGGLVQPGGSLRLSCAASGIPFRSRTMGWFRQAPGKEREFVAGITGSGRSQYYADSVKGRFTISADNSKNTAYLQMNSLKPEDTAVYYCARGARIFGSVAPWRGGNYYGMDVWGQGTLVTVSS

SEQ ID NO: 3048 - protein, 119 aa, synthetic construct
EVQLVESGGGLVQPGGSLRLSCAASGFTFSSFRMGWFRQAPGKEREFVAGISRGGSTNYADSVKGRFTISADNSKNTAYLQMNSLKPEDTAVYYCARASGLWFRRPHVWGQGTLVTVSS

SEQ ID NO: 3049 - protein, 126 aa, synthetic construct
EVQLVESGGGLVQPGGSLRLSCAASGRNFRRNSMGWFRQAPGKEREFVAGISWSGARTHYADSVKGRFTISADNSKNTAYLQMNSLKPEDTAVYYCARVSRRPRSPPGYYYGMDVWGQGTLVTVSS

SEQ ID NO: 3050 - protein, 125 aa, synthetic construct
EVQLVESGGGLVQPGGSLRLSCAASGRNLRMYRMGWFRQAPGKEREFVATIRWSDGSTYYADSVKGRFTISADNSKNTAYLQMNSLKPEDTAVYYCTRARLRYFDWLFPTNFDYWGQGTLVTVSS

SEQ ID NO: 3051 - protein, 122 aa, synthetic construct
EVQLVESGGGLVQPGGSLRLSCAASGGLTFSSNTMGWFRQAPGKEREFVASISSSGRTSYADSVKGRFTISADNSKNTAYLQMNSLKPEDTAVYYCARRVRRLWFRSYFDLWGQGTLVTVSS

SEQ ID NO: 3052 - protein, 121 aa, synthetic construct
EVQLVESGGGLVQPGGSLRLSCAASGFTLAYYAMGWFRQAPGKEREFVAAISWSGRNINYADSVKGRFTISADNSKNTAYLQMNSLKPEDTAVYYCARERARWFGKFSVSWGQGTLVTVSS

SEQ ID NO: 3053 - protein, 115 aa, synthetic construct
EVQLVESGGGLVQPGGSLRLSCAASGRTFSSFPMGWFRQAPGKEREFVAAISWSGSTSYADSVKGRFTISADNSKNTAYLQMNSLKPEDTAVYYSACGRLGFGAWGQGTLVTVSS

SEQ ID NO: 3054 - protein, 125 aa, synthetic construct
EVQLVESGGGLVQPGGSLRLSCAASGISSSKRNMGWFRQAPGKEREFVATWTSRGITTYADSVKGRFTISADNSKNTAYLQMNSLKPEDTAVYYCARGGPPRLWGSYRRKYFDYWGQGTLVTVSS

SEQ ID NO: 3055 - protein, 117 aa, synthetic construct
EVQLVESGGGLVQPGGSLRLSCAASGRTFSIYAMGWFRQAPGKEREFVARITRGGITKYADSVKGRFTISADNSKNTAYLQMNSLKPEDTAVYYCARGLGWLLGYYWGQGTLVTVSS

SEQ ID NO: 3056 - protein, 120 aa, synthetic construct
EVQLVESGGGLVQPGGSLRLSCAASGRMYNSYSMGWFRQAPGKEREFVARISPGGTFYADSVKGRFTISADNSKNTAYLQMNSLKPEDTAVYYCTTSARSGWFWRYFDSWGQGTLVTVSS

SEQ ID NO: 3057 - protein, 124 aa, synthetic construct
EVQLVESGGGLVQPGGSLRLSCAASGRTFRSYGMGWFRQAPGKEREFVASISRSGTTMYADSVKGRFTISADNSKNTAYLQMNSLKPEDTAVYYCARRGLLQWFGAPNSWFDPWGQGTLVTVSS

SEQ ID NO: 3058 - protein, 121 aa, synthetic construct
EVQLVESGGGLVQPGGSLRLSCAASGRTIRTMGWFRQAPGKEREFVATINSRGITNYADSVKGRFTISADNSKNTAYLQMNSLKPEDTAVYYCTTERDGLLWFRELFRPSWGQGTLVTVSS

SEQ ID NO: 3059 - protein, 120 aa, synthetic construct
EVQLVESGGGLVQPGGSLRLSCAASGRSFSFNAMGWFRQAPGKEREFVARISRFGRTNYADSVKGRFTISADNSKNTAYLQMNSLKPEDTAVYYCAKVHSYVWGGHSDYWGQGTLVTVSS

SEQ ID NO: 3060 - protein, 123 aa, synthetic construct
EVQLVESGGGLVQPGGSLRLSCAASGRTYYAMGWFRQAPGKEREFVGAIDWSGRRITYADSVKGRFTISADNSKNTAYLQMNSLKPEDTAVYYCARVRFSRLGGVIGRPIDSWGQGTLVTVSS

SEQ ID NO: 3061 - protein, 120 aa, synthetic construct
EVQLVESGGGLVQPGGSLRLSCAASGRAFRRYTMGWFRQAPGKEREFVASITKFGSTNYADSVKGRFTISADNSKNTAYLQMNSLKPEDTAVYYCAKDRGVLWFGELWYWGQGTLVTVSS

SEQ ID NO: 3062 - protein, 128 aa, synthetic construct
EVQLVESGGGLVQPGGSLRLSCAASGRTFSNYRMGWFRQAPGKEREFVASINRGGSTKYADSVKGRFTISADNSKNTAYLQMNSLKPEDTAVYYCASGKGGSATIFHLSRRPLYFDYWGQGTLVTVSS

SEQ ID NO: 3063 - protein, 125 aa, synthetic construct
EVQLVESGGGLVQPGGSLRLSCAASGITFSPYAMGWFRQAPGKEREFVATINWSGGYTVYADSVKGRFTISADNSKNTAYLQMNSLKPEDTAVYYCAKRKNRGPLWFGGGGWGYWGQGTLVTVSS

SEQ ID NO: 3064 - protein, 130 aa, synthetic construct
EVQLVESGGGLVQPGGSLRLSCAASGRTFSGFTMSSTWMGWFRQAPGKEREFVAGIITNGSTNYADSVKGRFTISADNSKNTAYLQMNSLKPEDTAVYYCARRVAYSSFWSGLRKHMDVWGQGTLVTVSS

SEQ ID NO: 3065 - protein, 118 aa, synthetic construct
EVQLVESGGGLVQPGGSLRLSCAASGRTFRRYSMGWFRQAPGKEREFVASITPGGNTNYADSVKGRFTISADNSKNTAYLQMNSLKPEDTAVYYCASRRRWLTPYIFWGQGTLVTVSS

SEQ ID NO: 3066 - protein, 116 aa, synthetic construct
EVQLVESGGGLVQPGGSLRLSCAASGSIFSIGMGWFRQAPGKEREFVARIWWRSGATYYADSVKGRFTISADNSKNTAYLQMNSLKPEDTAVYYCAAISIFGRLKWGQGTLVTVSS

SEQ ID NO: 3067 - protein, 126 aa, synthetic construct
EVQLVESGGGLVQPGGSLRLSCAASGRTFTSYRMGWFRQAPGKEREFVAEISSSGGYTYYADSVKGRFTISADNSKNTAYLQMNSLKPEDTAVYYCARVGPLRFLAQRPRLRPDYWGQGTLVTVSS

SEQ ID NO: 3068 - protein, 122 aa, synthetic construct
EVQLVESGGGLVQPGGSLRLSCAASGRTFSSFRFRAMGWFRQAPGKEREFVALIFSGGSTYYADSVKGRFTISADNSKNTAYLQMNSLKPEDTAVYYCAREWGRWLQRGSYWGQGTLVTVSS

SEQ ID NO: 3069 - protein, 128 aa, synthetic construct
EVQLVESGGGLVQPGGSLRLSCAASGRTFGSYGMGWFRQAPGKEREFVATISIGGRTYYADSVKGRFTISADNSKNTAYLQMNSLKPEDTAVYYCARGSGSGFMWYHGNNNYDRWRYWGQGTLVTVSS

SEQ ID NO: 3070 - protein, 123 aa, synthetic construct
EVQLVESGGGLVQPGGSLRLSCAASGRTFRSYPMGWFRQAPGKEREFVASINRGGSTNYADSVKGRFTISADNSKNTAYLQMNSLKPEDTAVYYCARGRYDFWSGYYRWFDPWGQGTLVTVSS

SEQ ID NO: 3071 - protein, 127 aa, synthetic construct
EVQLVESGGGLVQPGGSLRLSCAASGRTFSRSDMGWFRQAPGKEREFVAAISWSGGSTSYADSVKGRFTISADNSKNTAYLQMNSLKPEDTAVYYCATVPPPRRFLEWLPRRLTYIWGQGTLVTVSS

SEQ ID NO: 3072 - protein, 116 aa, synthetic construct
EVQLVESGGGLVQPGGSLRLSCAASGRTFRRYTMGWFRQAPGKEREFVASMRGSRSYYADSVKGRFTISADNSKNTAYLQMNSLKPEDTAVYYCARMSGFPFLDYWGQGTLVTVSS

SEQ ID NO: 3073 - protein, 122 aa, synthetic construct
EVQLVESGGGLVQPGGSLRLSCAASGSIFRLSTMGWFRQAPGKEREFVASISSFGSTYYADSVKGRFTISADNSKNTAYLQMNSLKPEDTAVYYCARTRGIFLWFGESFDYWGQGTLVTVSS

SEQ ID NO: 3074 - protein, 122 aa, synthetic construct
EVQLVESGGGLVQPGGSLRLSCAASGIAFRIRTMGWFRQAPGKEREFVASITSGGSTNYADSVKGRFTISADNSKNTAYLQMNSLKPEDTAVYYCARGGPRFGGFRGYFDPWGQGTLVTVSS

SEQ ID NO: 3075 - protein, 119 aa, synthetic construct
EVQLVESGGGLVQPGGSLRLSCAASGFTFTSYRMGWFRQAPGKEREFVAGISRFFGTAYYADSVKGRFTISADNSKNTAYLQMNSLKPEDTAVYYCARVTRWFGGLDVWGQGTLVTVSS

SEQ ID NO: 3076 - protein, 122 aa, synthetic construct
EVQLVESGGGLVQPGGSLRLSCAASGRTFSRYVMGWFRQAPGKEREFVASISRFGRTNYADSVKGRFTISADNSKNTAYLQMNSLKPEDTAVYYCARHHGLGILWWGTMDVWGQGTLVTVSS

SEQ ID NO: 3077 - protein, 116 aa, synthetic construct
EVQLVESGGGLVQPGGSLRLSCAASGRTFSMGWFRQAPGKEREFVASISRFGRTNYADSVKGRFTISADNSKNTAYLQMNSLKPEDTAVYYCAKRSTWLPQHFDSWGQGTLVTVSS

SEQ ID NO: 3078 - protein, 121 aa, synthetic construct
EVQLVESGGGLVQPGGSLRLSCAASGRTFSTYTMGWFRQAPGKEREFVARIWRSGGNTYYADSVKGRFTISADNSKNTAYLQMNSLKPEDTAVYYCARGVRGVFRAYFDHWGQGTLVTVSS

SEQ ID NO: 3079 - protein, 127 aa, synthetic construct
EVQLVESGGGLVQPGGSLRLSCAASGRNLRMYRMGWFRQAPGKEREFVALISRVGVTSYADSVKGRFTISADNSKNTAYLQMNSLKPEDTAVYYCARGTSFFNFWSGSLGRVGFDSWGQGTLVTVSS

SEQ ID NO: 3080 - protein, 123 aa, synthetic construct
EVQLVESGGGLVQPGGSLRLSCAASGITIRTHAMGWFRQAPGKEREFVATISRSGGNTYYADSVKGRFTISADNSKNTAYLQMNSLKPEDTAVYYCTTAGVLRYFDWFRRPYWGQGTLVTVSS

SEQ ID NO: 3081 - protein, 125 aa, synthetic construct
EVQLVESGGGLVQPGGSLRLSCAASGRTFRRYHMGWFRQAPGKEREFVAAITSGGRTNYADSVKGRFTISADNSKNTAYLQMNSLKPEDTAVYYCTTDGLRYFDWFPWASAFDIWGQGTLVTVSS

SEQ ID NO: 3082 - protein, 118 aa, synthetic construct
EVQLVESGGGLVQPGGSLRLSCAASGRTFRRYTMGWFRQAPGKEREFVAVISWSGGSTKYADSVKGRFTISADNSKNTAYLQMNSLKPEDTAVYYCARKGRWSGMNVWGQGTLVTVSS

SEQ ID NO: 3083 - protein, 126 aa, synthetic construct
EVQLVESGGGLVQPGGSLRLSCAASGRTFSWYPMGWFRQAPGKEREFVASISWGGARTYYADSVKGRFTISADNSKNTAYLQMNSLKPEDTAVYYCARSTGPRGSGRYRAHWFDSWGQGTLVTVSS

SEQ ID NO: 3084 - protein, 118 aa, synthetic construct
EVQLVESGGGLVQPGGSLRLSCAASGRTFTSYRMGWFRQAPGKEREFVAAITWNSGRTRYADSVKGRFTISADNSKNTAYLQMNSLKPEDTAVYYCSPSSWPFYFGAWGQGTLVTVSS

SEQ ID NO: 3085 - protein, 128 aa, synthetic construct
EVQLVESGGGLVQPGGSLRLSCAASGRPLRRYVMGWFRQAPGKEREFVAAITNGGSTKYADSVKGRFTISADNSKNTAYLQMNSLKPEDTAVYYCARGTPWRLLWFGTLGPPPAFDYWGQGTLVTVSS

SEQ ID NO: 3086 - protein, 120 aa, synthetic construct
EVQLVESGGGLVQPGGSLRLSCAASGRTFRRYAMGWFRQAPGKEREFVAAINRSGSTEYADSVKGRFTISADNSKNTAYLQMNSLKPEDTAVYYCARQHQDFWTGYYTVWGQGTLVTVSS

SEQ ID NO: 3087 - protein, 122 aa, synthetic construct
EVQLVESGGGLVQPGGSLRLSCAASGRTFRRYTMGWFRQAPGKEREFVASISRSGTTYYADSVKGRFTISADNSKNTAYLQMNSLKPEDTAVYYCAKEGWRWLQLRGGFDYWGQGTLVTVSS

SEQ ID NO: 3088 - protein, 121 aa, synthetic construct
EVQLVESGGGLVQPGGSLRLSCAASGRTLSTYNMGWFRQAPGKEREFVASISRFGRTNYADSVKGRFTISADNSKNTAYLQMNSLKPEDTAVYYCARRGKLSAAMHWFDPWGQGTLVTVSS

SEQ ID NO: 3089 - protein, 117 aa, synthetic construct
EVQLVESGGGLVQPGGSLRLSCAASGRFFSTRVMGWFRQAPGKEREFVARIWPGGSTYYADSVKGRFTISADNSKNTAYLQMNSLKPEDTAVYYCARDRGIFGVSRWGQGTLVTVSS

SEQ ID NO: 3090 - protein, 117 aa, synthetic construct
EVQLVESGGGLVQPGGSLRLSCAASGRFFSICSMGWFRQAPGKEREFVAGINWRSGGSTYYADSVKGRFTISADNSKNTAYLQMNSLKPEDTAVYYCARGSGWWEYWGQGTLVTVSS

SEQ ID NO: 3091 - protein, 124 aa, synthetic construct
EVQLVESGGGLVQPGGSLRLSCAASGRMFSSRSNMGWFRQAPGKEREFVASISSGGTTAYADSVKGRFTISADNSKNTAYLQMNSLKPEDTAVYYCARGFGRRFLEWLPRFDYWGQGTLVTVSS

SEQ ID NO: 3092 - protein, 120 aa, synthetic construct
EVQLVESGGGLVQPGGSLRLSCAASGRTFSSARMGWFRQAPGKEREFVAGINMISSTKYADSVKGRFTISADNSKNTAYLQMNSLKPEDTAVYYCAHFRRFLPRGYVDYWGQGTLVTVSS

SEQ ID NO: 3093 - protein, 125 aa, synthetic construct
EVQLVESGGGLVQPGGSLRLSCAASGRTFRRYTMGWFRQAPGKEREFVARIAGGSTYYADSVKGRFTISADNSKNTAYLQMNSLKPEDTAVYYCARQQYYDFWSGYFRSGYFDLWGQGTLVTVSS

SEQ ID NO: 3094 - protein, 126 aa, synthetic construct
EVQLVESGGGLVQPGGSLRLSCAASGHTFRNYGMGWFRQAPGKEREFVAAITSSGSTNYADSVKGRFTISADNSKNTAYLQMNSLKPEDTAVYYCATVPPPRRFLEWLPRRLTYTWGQGTLVTVSS

SEQ ID NO: 3095 - protein, 121 aa, synthetic construct
EVQLVESGGGLVQPGGSLRLSCAASGRTFSRYAMGWFRQAPGKEREFVASITKFGSTNYADSVKGRFTISADNSKNTAYLQMNSLKPEDTAVYYCAKERESRFLKWRKTDWGQGTLVTVSS

SEQ ID NO: 3096 - protein, 121 aa, synthetic construct
EVQLVESGGGLVQPGGSLRLSCAASGRNLRMYRMGWFRQAPGKEREFVASISRFGRTNYADSVKGRFTISADNSKNTAYLQMNSLKPEDTAVYYCARHDSIGLFRHGMDVWGQGTLVTVSS

SEQ ID NO: 3097 - protein, 124 aa, synthetic construct
EVQLVESGGGLVQPGGSLRLSCAASGRTFRRYAMGWFRQAPGKEREFVARISSGGSTSYADSVKGRFTISADNSKNTAYLQMNSLKPEDTAVYYCARDRGFGFWSGLRGYFDLWGQGTLVTVSS

SEQ ID NO: 3098 - protein, 123 aa, synthetic construct
EVQLVESGGGLVQPGGSLRLSCAASGIPASMYLGWFRQAPGKEREFVAAITSGGRTSYADSVKGRFTISADNSKNTAYLQMNSLKPEDTAVYYCAKRKKRGPLWFGGGGWGYWGQGTLVTVSS

SEQ ID NO: 3099 - protein, 121 aa, synthetic construct
EVQLVESGGGLVQPGGSLRLSCAASGIPFRSRTFSAYAMGWFRQAPGKEREFVAQITRGGSTNYADSVKGRFTISADNSKNTAYLQMNSLKPEDTAVYYCARRHWFGFDYWGQGTLVTVSS

SEQ ID NO: 3100 - protein, 109 aa, synthetic construct
QSALTQPASVSGSPGQSITISCTGTSSDVGSNNLVSWYQQHPGKAPKLMIYEGDKRPSGVSNRFSGSKSGNTASLTISGLQAEDEADYYCCSYATGFYVFGGGTKLTVL

SEQ ID NO: 3101 - protein, 110 aa, synthetic construct
QSALTQPASVSGSPGQSITISCTGTSSVGGYNLVSWYQQHPGKAPKLMIYEGSKRPSGVSNRFSGSKSGNTASLTISGLQAEDEADYYCCSYAGSYTLAVFGGGTKLTVL

SEQ ID NO: 3102 - protein, 113 aa, synthetic construct
QSALTQPASVSGSPGQSITISCTGTSSNVGSYNLVSWYQQHPGKAPKLMIYEGTKRPSGVSNRFSGSKSGNTASLTISGLQAEDEADYYCCSYAGSSTFKAYVFGGGTKLTVL

SEQ ID NO: 3103 - protein, 111 aa, synthetic construct
QSALTQPASVSGSPGQSITISCTGTSSDVGGYNLVSWYQQHPGKAPKLMIYEGTKRPSGVSNRFSGSKSGNTASLTISGLQAEDEADYYCCSYAGSSTHYVFGGGTKLTVL

SEQ ID NO: 3104 - protein, 112 aa, synthetic construct
QSALTQPASVSGSPGQSITISCTGTSSDVGSYHLVSWYQQHPGKAPKLMIYEGTKRPSGVSNRFSGSKSGNTASLTISGLQAEDEADYYCCSYAGSYTFGVVFGGGTKLTVL

SEQ ID NO: 3105 - protein, 110 aa, synthetic construct
QSALTQPASVSGSPGQSITISCTGTSSDVGSNNLVSWYQQHPGKAPKLMIYEGGKRPSGVSNRFSGSKSGNTASLTISGLQAEDEADYYCCSYSGRYTYVFGGGTKLTVL

SEQ ID NO: 3106 - protein, 111 aa, synthetic construct
QSALTQPASVSGSPGQSITISCTGTSSDVGNYNLVSWYQQHPGKAPKLMIYEGTKRPSGVSNRFSGSKSGNTASLTISGLQAEDEADYYCCSYAGSYTFAVFGGGTKLTVL

SEQ ID NO: 3107 - protein, 110 aa, synthetic construct
QSALTQPASVSGSPGQSITISCTGTSSDIGSYNLVSWYQQHPGKAPKLMIYEASRPSGVSNRFSGSKSGNTASLTISGLQAEDEADYYCCSYAGSGIFYVFGGGTKLTVL

SEQ ID NO: 3108 - protein, 110 aa, synthetic construct
QSALTQPASVSGSPGQSITISCTGTGSDVGYNLVSWYQQHPGKAPKLMIYEVSKRPSGVSNRFSGSKSGNTASLTISGLQAEDEADYYCCSYAGSSTFEVFGGGTKLTVL

SEQ ID NO: 3109 - protein, 111 aa, synthetic construct
QSALTQPASVSGSPGQSITISCTGTSSDVGDYNLVSWYQQHPGKAPKLMIYEGGKRPSGVSNRFSGSKSGNTASLTISGLQAEDEADYYCCSYAGSSTNVVFGGGTKLTVL

SEQ ID NO: 3110 - protein, 109 aa, synthetic construct
QSALTQPASVSGSPGQSITISCTGTSSDVGTYNLVSWYQQHPGKAPKLMIYEGYKRPSGVSNRFSGSKSGNTASLTISGLQAEDEADYYCCSYAGNLWLFGGGTKLTVL

SEQ ID NO: 3111 - protein, 111 aa, synthetic construct
QSALTQPASVSGSPGQSITISCTGTSSDVGHYNLVSWYQQHPGKAPKLMIYEGGKRPSGVSNRFSGSKSGNTASLTISGLQAEDEADYYCCSYAGRDTYVAFGGGTKLTVL

SEQ ID NO: 3112 - protein, 110 aa, synthetic construct
QSALTQPASVSGSPGQSITISCTGTSSDVGRYNLVSWYQQHPGKAPKLMIYEGTKRPSGVSNRFSGSKSGNTASLTISGLQAEDEADYYCCSYAGSRTVVFGGGTKLTVL

SEQ ID NO: 3113 - protein, 109 aa, synthetic construct
QSALTQPASVSGSPGQSITISCTGASSDVGSYNLVSWYQQHPGKAPKLMIYEGTKRPSGVSNRFSGSKSGNTASLTISGLQAEDEADYYCCSYAGSSGVFGGGTKLTVL

SEQ ID NO: 3114 - protein, 111 aa, synthetic construct
QSALTQPASVSGSPGQSITISCTGTSTDVGSYNLVSWYQQHPGKAPKLMIYEGFKRPSGVSNRFSGSKSGNTASLTISGLQAEDEADYYCCSYAGSYTLGVFGGGTKLTVL

SEQ ID NO: 3115 - protein, 109 aa, synthetic construct
QSALTQPASVSGSPGQSITISCTGTTSDVGSYNLVSWYQQHPGKAPKLMIYEGTKRPSGVSNRFSGSKSGNTASLTISGLQAKDEADYYCSYTSSRTGVFGGGTKLTVL

SEQ ID NO: 3116 - protein, 108 aa, synthetic construct
QSALTQPASVSGSPGQSITISCTATSSDVGSYNLVSWYQQHPGKAPKLMIYEGTKRPSGVSNRFSGSKSGNTASLTISGLQAEDEADYYCCSYAGSWVFGGGTKLTVL

SEQ ID NO: 3117 - protein, 111 aa, synthetic construct
QSALTQPASVSGSPGQSITISCTGTSSDVGSNNLVSWYQQHPGKAPKLMIYEGSKWPSGVSNRFSGSKSGNTASLTISGLQAEDEADYYCCSFAGSSTDVVFGGGTKLTVL

SEQ ID NO: 3118 - protein, 110 aa, synthetic construct
QSALTQPASVSGSPGQSITISCTGASSDVGSYNLVSWYQQHPGKAPKLMIYEGFKRPSGVSNRFSGSKSGNTASLTISGLQAEDEADYYCCSYAGSHTYVFGGGTKLTVL

SEQ ID NO: 3119 - protein, 109 aa, synthetic construct
QSALTQPASVSGSPGQSITISCTGTSSDVGSYYLVSWYQQHPGKAPKLMIYEGFKRPSGVSNRFSGSKSGNTASLTISGLQAEDEADYYCCSYAGSLYVFGGGTKLTVL

SEQ ID NO: 3120 - protein, 109 aa, synthetic construct
QSALTQPASVSGSPGQSITISCTGTSSDVGSYSLVSWYQQHPGKAPKLMIYEGDKRPSGVSNRFSGSKSGNTASLTISGLQAEDEADYYCCSYAGSRRVFGGGTKLTVL

SEQ ID NO: 3121 - protein, 110 aa, synthetic construct
QSALTQPASVSGSPGQSITISCTGSSSDVGSYNLVSWYQQHPGKAPKLMIYEGTKRPSGVSNRFSGSKSGNTASLTISGLQAEDEADYYCCSYAGSSNWVFGGGTKLTVL

SEQ ID NO: 3122 - protein, 112 aa, synthetic construct
QSALTQPASVSGSPGQSITISCTGTSSDVGYYNLVSWYQQHPGKAPKLMIYEGGKRPSGVSNRFSGSKSGNTASLTISGLQAEDEADYYCCSYAGSSTPYVVFGGGTKLTVL

SEQ ID NO: 3123 - protein, 111 aa, synthetic construct; identical to SEQ ID NO: 3117

SEQ ID NO: 3124 - protein, 110 aa, synthetic construct
QSALTQPASVSGSPGQSITISCTGTSSDVGSSNLVSWYQQHPGKAPKLMIYEGDKRPSGVSNRFSGSKSGNTASLTISGLQAEDEADYYCCSYAGSYGVVFGGGTKLTVL

SEQ ID NO: 3125 - protein, 110 aa, synthetic construct
QSALTQPASVSGSPGQSITISCTGTSSDIGSYNLVSWYQQHPGKAPKLMIYEGFKRPSGVSNRFSGSKSGNTASLTISGLQAEDEADYYCCSYAGSYSVVFGGGTKLTVL

SEQ ID NO: 3126 - protein, 111 aa, synthetic construct
QSALTQPASVSGSPGQSITISCTGTSSDVGAYNLVSWYQQHPGKAPKLMIHEGNKRPSGVSNRFSGSKSGNTASLTISGLQAEDEADYYCCSYAGDSFPYVFGGGTKLTVL

SEQ ID NO: 3127 - protein, 111 aa, synthetic construct
QSALTQPASVSGSPGQSITISCTGTSRDVGSYNLVSWYQQHPGKAPKLMIYEASKRPSGVSNRFSGSKSGNTASLTISGLQAEDEADYYCCSYAGSYTLYVFGGGTKLTVL

SEQ ID NO: 3128 - protein, 110 aa, synthetic construct
QSALTQPASVSGSPGQSITISCTGTSSDVGHYNLVSWYQQHPGKAPKLMIYEGGKRPSGVSNRFSGSKSGNTASLTISGLQAEDEADYYCCSYAGSSIYVFGGGTKLTVL

SEQ ID NO: 3129 - protein, 108 aa, synthetic construct
QSALTQPASVSGSPGQSITISCTGTSSDVGNYNLVSWYQQHPGKAPKLMIYEGTKRPSGVSNRFSGSKSGNTASLTISGLQAEDEADYYCCSYAGTVVFGGGTKLTVL

SEQ ID NO: 3130 - protein, 109 aa, synthetic construct
QSALTQPASVSGSPGQSITISCTGTSSDVGKYNLVSWYQQHPGKAPKLMIYEGSQRPSGVSNRFSGSKSGNTASLTISGLQAEDEADYYCCSYAGSSTVFGGGTKLTVL

SEQ ID NO: 3131 - protein, 110 aa, synthetic construct
QSALTQPASVSGSPGQSITISCTGTSSDVGSNNLVSWYQQHPGKAPKLMIYEGDKRPSGVSNRFSGSKSGNTASLTISGLQAEDEADYYCCSYTGSYTVVFGGGTKLTVL

SEQ ID NO: 3132 - protein, 111 aa, synthetic construct; identical to SEQ ID NO: 3109

SEQ ID NO: 3133 - protein, 111 aa, synthetic construct
QSALTQPASVSGSPGQSITISCTGTSSDVGKYNLVSWYQQHPGKAPKLMIYEASKRPSGVSNRFSGSKSGNTASLTISGLQAEDEADYYCYSYAGSYTLGVFGGGTKLTVL

SEQ ID NO: 3134 - protein, 111 aa, synthetic construct
QSALTQPASVSGSPGQSITISCTGTSSDVGSYNHVSWYQQHPGKAPKLMIYEGGKRPSGVSNRFSGSKSGNTASLTISGLQAEDEADYYCCSYAGTTTPFVFGGGTKLTVL

SEQ ID NO: 3135 - protein, 110 aa, synthetic construct
QSALTQPASVSGSPGQSITISCTGTSSDVGKYNLVSWYQQHPGKAPKLMIYETRKRPSGVSNRFSGSKSGNTASLTISGLQAEDEADYYCCSYAGSSTVVFGGGTKLTVL

SEQ ID NO: 3136 - protein, 107 aa, synthetic construct; identical to SEQ ID NO: 2726

SEQ ID NO: 3137 - protein, 108 aa, synthetic construct; identical to SEQ ID NO: 2727

SEQ ID NO: 3138 - protein, 108 aa, synthetic construct; identical to SEQ ID NO: 2728

SEQ ID NO: 3139 - protein, 106 aa, synthetic construct; identical to SEQ ID NO: 2729

SEQ ID NO: 3140 - protein, 108 aa, synthetic construct; identical to SEQ ID NO: 2731

SEQ ID NO: 3141 - protein, 108 aa, synthetic construct; identical to SEQ ID NO: 2731

SEQ ID NO: 3142 - protein, 107 aa, synthetic construct; identical to SEQ ID NO: 2732

SEQ ID NO: 3143 - protein, 108 aa, synthetic construct; identical to SEQ ID NO: 2734

SEQ ID NO: 3144 - protein, 108 aa, synthetic construct; identical to SEQ ID NO: 2735

SEQ ID NO: 3145 - protein, 108 aa, synthetic construct; identical to SEQ ID NO: 2737

SEQ ID NO: 3146 - protein, 108 aa, synthetic construct; identical to SEQ ID NO: 2731

SEQ ID NO: 3147 - protein, 108 aa, synthetic construct; identical to SEQ ID NO: 2731

SEQ ID NO: 3148 - protein, 107 aa, synthetic construct; identical to SEQ ID NO: 2739

SEQ ID NO: 3149 - protein, 107 aa, synthetic construct; identical to SEQ ID NO: 2740

SEQ ID NO: 3150 - protein, 110 aa, synthetic construct; identical to SEQ ID NO: 2746

SEQ ID NO: 3151 - protein, 110 aa, synthetic construct; identical to SEQ ID NO: 2747

SEQ ID NO: 3152 - protein, 111 aa, synthetic construct; identical to SEQ ID NO: 2748

SEQ ID NO: 3153 - protein, 112 aa, synthetic construct; identical to SEQ ID NO: 2749

SEQ ID NO: 3154 - protein, 112 aa, synthetic construct; identical to SEQ ID NO: 2750

SEQ ID NO: 3155 - protein, 108 aa, synthetic construct; identical to SEQ ID NO: 2728

SEQ ID NO: 3156 - protein, 108 aa, synthetic construct; identical to SEQ ID NO: 2728

SEQ ID NO: 3157 - protein, 106 aa, synthetic construct
DIQMTQSPSSLSASVGDRVTITCRASQTINTFLNWYQQKPGKAPKLLIYSASTLQSGVPSRFSGSGSGTDFTLTISSLQPEDFATYYCQQSYSTFTFGGGTKVEIK

SEQ ID NO: 3158 - protein, 108 aa, synthetic construct
DIQMTQSPSSLSASVGDRVTITCRASQTIRTYLNWYRQKPGKAPKLLIYDASTLQRGVPSRFSGSGSGTDFTLTISSLQPEDFATYYCQQSYRTPPWTFGGGTKVEIK

SEQ ID NO: 3159 - protein, 107 aa, synthetic construct
DIQMTQSPSSLSASVGDRVTITCRSSQSISSYLNWYQQKPGEAPKLLIYGASRLRSGVPSRFSGSGSGTDFTLTISSLQPEDFATYYCQQGYSAPWTFGGGTKVEIK

SEQ ID NO: 3160 - protein, 107 aa, synthetic construct
DIQMTQSPSSLSASVGDRVTITCRASQSISGSLNWYQQKPGKAPKLLIYAESRLHSGVPSRFSGSGSGTDFTLTISSLQPEDFATYYCQQSYSPPQTFGGGTKVEIK

SEQ ID NO: 3161 - protein, 107 aa, synthetic construct
DIQMTQSPSSLSASVGDRVTITCRASRSISTYLNWYQQKPGKAPKLLIYAASNLQGGVPSRLSGSGSGTDFTLTISSLQPEDFATYYCQQSHSIPRTFGGGTKVEIK

SEQ ID NO: 3162 - protein, 108 aa, synthetic construct; identical to SEQ ID NO: 2728

SEQ ID NO: 3163 - protein, 107 aa, synthetic construct
DIQMTQSPSSLSASVGDRVTITCRASQSIRKYLNWYQQKPGKAPKLLIYASSTLQRGVPSRFSGSGSGTDFTLTISSLQPEDFATYYCQQSLSTPFTFGGGTKVEIK

SEQ ID NO: 3164 - protein, 107 aa, synthetic construct; identical to SEQ ID NO: 2769

SEQ ID NO: 3165 - protein, 107 aa, synthetic construct; identical to SEQ ID NO: 2773

SEQ ID NO: 3166 - protein, 103 aa, synthetic construct; identical to SEQ ID NO: 2768

SEQ ID NO: 3167 - protein, 107 aa, synthetic construct; identical to SEQ ID NO: 2774

SEQ ID NO: 3168 - protein, 107 aa, synthetic construct; identical to SEQ ID NO: 2770

SEQ ID NO: 3169 - protein, 107 aa, synthetic construct; identical to SEQ ID NO: 2767

SEQ ID NO: 3170 - protein, 107 aa, synthetic construct; identical to SEQ ID NO: 2771

SEQ ID NO: 3171 - protein, 107 aa, synthetic construct; identical to SEQ ID NO: 2772

SEQ ID NO: 3172 - protein, 107 aa, synthetic construct; identical to SEQ ID NO: 2776

SEQ ID NO: 3173 - protein, 107 aa, synthetic construct; identical to SEQ ID NO: 2777

SEQ ID NO: 3174 - protein, 107 aa, synthetic construct; identical to SEQ ID NO: 2775

SEQ ID NO: 3175 - protein, 107 aa, synthetic construct; identical to SEQ ID NO: 2779

SEQ ID NO: 3176 - protein, 107 aa, synthetic construct; identical to SEQ ID NO: 2774

SEQ ID NO: 3177 - protein, 107 aa, synthetic construct; identical to SEQ ID NO: 2778

SEQ ID NO: 3178 - protein, 107 aa, synthetic construct; identical to SEQ ID NO: 2795

SEQ ID NO: 3179 - protein, 107 aa, synthetic construct; identical to SEQ ID NO: 2796

SEQ ID NO: 3180 - protein, 107 aa, synthetic construct; identical to SEQ ID NO: 2797

SEQ ID NO: 3181 - protein, 107 aa, synthetic construct; identical to SEQ ID NO: 2798

SEQ ID NO: 3182 - protein, 107 aa, synthetic construct; identical to SEQ ID NO: 2799

SEQ ID NO: 3183 - protein, 107 aa, synthetic construct; identical to SEQ ID NO: 2800

SEQ ID NO: 3184 - protein, 107 aa, synthetic construct; identical to SEQ ID NO: 2801

SEQ ID NO: 3185 - protein, 107 aa, synthetic construct; identical to SEQ ID NO: 2802

SEQ ID NO: 3186 - protein, 107 aa, synthetic construct; identical to SEQ ID NO: 2803

SEQ ID NO: 3187 - protein, 107 aa, synthetic construct; identical to SEQ ID NO: 2804

SEQ ID NO: 3188 - protein, 107 aa, synthetic construct; identical to SEQ ID NO: 2805

SEQ ID NO: 3189 - protein, 107 aa, synthetic construct; identical to SEQ ID NO: 2806

SEQ ID NO: 3190 - protein, 107 aa, synthetic construct; identical to SEQ ID NO: 2807

SEQ ID NO: 3191 - protein, 107 aa, synthetic construct; identical to SEQ ID NO: 2808

SEQ ID NO: 3192 - protein, 486 aa, synthetic construct
EVQLVESGGGLVQPGGSLRLSCAASGSTFSINAMGWFRQAPGKEREFVAGITSSGGYTNYADSVKGRFTISADNSKNTAYLQMNSLKPEDTAVYYCAADGVPEYSDYASGPVWGQGTLVTVSSGGGGSGGGGSASEVQLVESGGGLVQPGGSLRLSCAASGFTFSPSWMGWFRQAPGKEREFVATINEYGGRNYADSVKGRFTISADNSKNTAYLQMNSLKPEDTAVYYCARVDRDFDYWGQGTLVTVSSGGGGSEPKSSDKTHTCPPCPAPELLGGPSVFLFPPKPKDTLMISRTPEVTCVVVDVSHEDPEVKFNWYVDGVEVHNAKTKPREEQYNSTYRVVSVLTVLHQDWLNGKEYKCKVSNKALPAPIEKTISKAKGQPREPQVYTLPPSREEMTKNQVSLTCLVKGFYPSDIAVEWESNGQPENNYKTTPPVLDSDGSFFLYSKLTVDKSRWQQGNVFSCSVMHEALHNHYTQKSLSLSPG

SEQ ID NO: 3193 - protein, 486 aa, synthetic construct
EVQLVESGGGLVQPGGSLRLSCAASGFTFSPSWMGWFRQAPGKEREFVATINEYGGRNYADSVKGRFTISADNSKNTAYLQMNSLKPEDTAVYYCARVDRDFDYWGQGTLVTVSSGGGGSEPKSSDKTHTCPPCPAPELLGGPSVFLFPPKPKDTLMISRTPEVTCVVVDVSHEDPEVKFNWYVDGVEVHNAKTKPREEQYNSTYRVVSVLTVLHQDWLNGKEYKCKVSNKALPAPIEKTISKAKGQPREPQVYTLPPSREEMTKNQVSLTCLVKGFYPSDIAVEWESNGQPENNYKTTPPVLDSDGSFFLYSKLTVDKSRWQQGNVFSCSVMHEALHNHYTQKSLSLSPGGGGGSGGGGSASEVQLVESGGGLVQPGGSLRLSCAASGSTFSINAMGWFRQAPGKEREFVAGITSSGGYTNYADSVKGRFTISADNSKNTAYLQMNSLKPEDTAVYYCAADGVPEYSDYASGPVWGQGTLVTVSS

SEQ ID NO: 3194 - DNA, 62 bp, synthetic construct
  source 1..62: mol_type = other DNA
  modified_base 51: mod_base = OTHER; note = Thymidine-succinyl hexamide cyanoethyl diisopropyl phosphoramidite
  modified_base 52: mod_base = OTHER; note = Thymidine-succinyl hexamide cyanoethyl diisopropyl phosphoramidite
agacaatcaaccatttggggtggacagccttgacctctagacttcggcattttttttttttt

SEQ ID NO: 3195 - DNA, 112 bp, synthetic construct
  source 1..112: mol_type = other DNA
  modified_base 101: mod_base = OTHER; note = Thymidine-succinyl hexamide cyanoethyl diisopropyl phosphoramidite
  modified_base 102: mod_base = OTHER; note = Thymidine-succinyl hexamide cyanoethyl diisopropyl phosphoramidite
cgggatccttatcgtcatcgtcgtacagatcccgacccatttgctgtccaccagtcatgctagccataccatgatgatgatgatgatgagaaccccgcattttttttttttt

SEQ ID NO: 3196 - DNA, 19 bp, synthetic construct
  source 1..19: mol_type = other DNA
atgcggggttctcatcatc

SEQ ID NO: 3197 - DNA, 20 bp, synthetic construct
  source 1..20: mol_type = other DNA
cgggatccttatcgtcatcg

SEQ ID NO: 3198 - protein, 18 aa, synthetic construct
CAADGVPEYSDYASGPVW

SEQ ID NO: 3199 - protein, 9 aa, synthetic construct
GTFSSIGMG

SEQ ID NO: 3200 - protein, 9 aa, synthetic construct
FTFSPSWMG

SEQ ID NO: 3201 - protein, 6 aa, synthetic construct
QTFNMG

SEQ ID NO: 3202 - protein, 9 aa, synthetic construct
FTFRRYDMG

SEQ ID NO: 3203 - protein, 9 aa, synthetic construct
STFSINAMG

SEQ ID NO: 3204 - protein, 9 aa, synthetic construct
GTFSSIGMG

SEQ ID NO: 3205 - protein, 9 aa, synthetic construct
STFSINAMG

SEQ ID NO: 3206 - protein, 9 aa, synthetic construct
STFSINAMG

SEQ ID NO: 3207 - protein, 9 aa, synthetic construct
RTFSMHAMG

SEQ ID NO: 3208 - protein, 9 aa, synthetic construct
STLSINAMG

SEQ ID NO: 3209 - protein, 14 aa, synthetic construct
VAAISWDGGATAYA

SEQ ID NO: 3210 - protein, 13 aa, synthetic construct
VATINEYGGRNYA

SEQ ID NO: 3211 - protein, 13 aa, synthetic construct
VAAIGSGGSTSYA

SEQ ID NO: 3212 - protein, 11 aa, synthetic construct
SAISGGLAYYA

SEQ ID NO: 3213 - protein, 13 aa, synthetic construct
AGITSSGGYTNYA

SEQ ID NO: 3214 - protein, 13 aa, synthetic construct
AAISWDGGATAYA

SEQ ID NO: 3215 - protein, 12 aa, synthetic construct
AGISRGGTTNYA

SEQ ID NO: 3216 - protein, 13 aa, synthetic construct
AGITSSGGYTNYA

SEQ ID NO: 3217 - protein, 12 aa, synthetic construct
ASISSQGRTNYA

SEQ ID NO: 3218 - protein, 13 aa, synthetic construct
AGITRSGSVTNYA

SEQ ID NO: 3219 - protein, 12 aa, synthetic construct
CAKEDVGKPFDW

SEQ ID NO: 3220 - protein, 11 aa, synthetic construct
CARVDRDFDYW

SEQ ID NO: 3221 - protein, 12 aa, synthetic construct
CWRLGNDYFDYW

SEQ ID NO: 3222 - protein, 13 aa, synthetic construct
CAVDLSGDAVYDW

SEQ ID NO: 3223 - protein, 18 aa, synthetic construct
CAADGVPEYSDYASGPVW

SEQ ID NO: 3224 - protein, 12 aa, synthetic construct
CAKEDVGKPFDW

SEQ ID NO: 3225 - protein, 18 aa, synthetic construct
CAADGVPEYSDYASGPVW

SEQ ID NO: 3226 - protein, 18 aa, synthetic construct
CAADGVPEYSDYASGPVW

SEQ ID NO: 3227 - protein, 16 aa, synthetic construct
CAAEVRNGSDYLPIDW

SEQ ID NO: 3228 - protein, 18 aa, synthetic construct
CAADGVPEYSDYASGPVW

What is claimed is:

1. A multispecific antibody comprising at least two binding domains to a spike glycoprotein or a receptor of the spike glycoprotein:
(a) a first binding domain of the at least two binding domains comprising a first variable domain, heavy chain region (VH), wherein the first VH region comprises complementarity determining regions CDRH1, CDRH2, and CDRH3, and wherein (i) an amino acid sequence of CDRH1 is as set forth in any one of SEQ ID NOs: 1-122; (ii) an amino acid sequence of CDRH2 is as set forth in any one of SEQ ID NOs: 652-773; and (iii) an amino acid sequence of CDRH3 is as set forth in any one of SEQ ID NOs: 1303-1425; and
(b) a second binding domain of the at least two binding domains comprising a second variable domain, heavy chain region (VH), wherein the first VH region comprises complementarity determining regions CDRH1, CDRH2, and CDRH3, and wherein (i) an amino acid sequence of CDRH1 is as set forth in any one of SEQ ID NOs: 123-651; (ii) an amino acid sequence of CDRH2 is as set forth in any one of SEQ ID NOs: 774-1302; and (iii) an amino acid sequence of CDRH3 is as set forth in any one of SEQ ID NOs: 1426-1953.

2. The multispecific antibody of claim 1, wherein the multispecific antibody is bispecific, trispecific, or tetraspecific.

3. The multispecific antibody of claim 1, wherein the multispecific antibody is bispecific.

4. The multispecific antibody of claim 1, wherein the multispecific antibody is bivalent, trivalent, or tetravalent.

5. The multispecific antibody of claim 1, wherein the multispecific antibody is bivalent.

6. The multispecific antibody of claim 1, wherein the antibody or antibody fragment comprises a KD of less than 50 nM.

7-9. (canceled)

10. A multispecific antibody comprising at least two binding domains to a spike glycoprotein or a receptor of the spike glycoprotein:
(a) a first binding domain of the at least two binding domains comprising a first variable domain, heavy chain region (VH) comprising an amino acid sequence at least about 90% identical to a sequence as set forth in any one of SEQ ID NOs: 2212-2333; and
(b) a second binding domain of the at least two binding domains comprising a second variable domain, heavy chain region (VH) comprising an amino acid sequence at least about 90% identical to a sequence as set forth in any one of SEQ ID NOs: 2334-3099.

11. The multispecific antibody of claim 10, wherein the multispecific antibody is bispecific, trispecific, or tetraspecific.

12. (canceled)

13. The multispecific antibody of claim 10, wherein the multispecific antibody is bivalent, trivalent, or tetravalent.

14. (canceled)

15. The multispecific antibody of claim 10, wherein the antibody or antibody fragment comprises a KD of less than 50 nM.

16-18. (canceled)

19. A nucleic acid composition comprising: a) a first nucleic acid encoding a first variable domain, heavy chain region (VH) comprising an amino acid sequence at least about 90% identical to a sequence as set forth in any one of SEQ ID NOs: 2212-2333; b) a second nucleic acid encoding a second variable domain, heavy chain region (VH) comprising an amino acid sequence at least about 90% identical to a sequence as set forth in any one of SEQ ID NOs: 2334-3099; and an excipient.

20. A method of treating a SARS-CoV-2 infection, comprising administering the multispecific antibody of claim 1.

21. The method of claim 20, wherein the multispecific antibody is administered prior to exposure to SARS-CoV-2.

22. The method of claim 21, wherein the multispecific antibody is administered at least about 1 week prior to exposure to SARS-CoV-2.

23. The method of claim 21, wherein the multispecific antibody is administered at least about 1 month prior to exposure to SARS-CoV-2.

24. (canceled)

25. The method of claim 19, wherein the multispecific antibody is administered after exposure to SARS-CoV-2.

26. (canceled)

27. The method of claim 25, wherein the multispecific antibody is administered at most about 1 week after exposure to SARS-CoV-2.

28. The method of claim 25, wherein the multispecific antibody is administered at most about 1 month after exposure to SARS-CoV-2.

29. A method of treating an individual with a SARS-CoV-2 infection with the multispecific antibody of claim 1 comprising:
(a) obtaining or having obtained a sample from the individual;
(b) performing or having performed an expression level assay on the sample to determine expression levels of SARS-CoV-2 antibodies; and
(c) if the sample has an expression level of the SARS-CoV-2 antibodies then administering to the individual the antibody or antibody fragment of claim 1, thereby treating the SARS-CoV-2 infection.

30. A method of diagnosing an individual with a SARS-CoV-2 infection with the multispecific antibody of claim 1 comprising:
(a) obtaining or having obtained a sample from the individual; and
(b) performing or having performed an expression level assay on the sample to determine expression levels of SARS-CoV-2 antibodies using the multispecific antibody of claim 1.
